(19) United States
(12) Patent Application Publication
(10) Pub. No.: US 2025/0011740 A1
(43) Pub. Date: Jan. 9, 2025

(54) NOVEL OMNI 117, 140, 150-158, 160-165, 167-177, 180-188, 191-198, 200, 201, 203, 205-209, 211-217, 219, 220, 222, 223, 226, 227, 229, 231-236, 238-245, 247, 250, 254, 256, 257, 260 AND 262 CRISPR NUCLEASES

(71) Applicant: EmendoBio Inc., Wilmington, DE (US)

(72) Inventors: Lior Izhar, Tel Aviv (IL); Nadav Marbach Bar, Rehovot (IL); Liat Rockah, Rishon LeZion (IL); Nurit Meron, Ramat Gan (IL); Ophir Adiv Tal, Rehovot (IL); Ariel Gispan, Kfar Adumim (IL); Idit Buch, Hod-Hasharon (IL)

(73) Assignee: EmendoBio Inc., Wilmington, DE (US)

(21) Appl. No.: 18/556,591

(22) PCT Filed: Apr. 21, 2022
(86) PCT No.: PCT/US2022/025803

§ 371 Date: Oct. 20, 2023

Related U.S. Application Data
(60) Provisional application No. 63/211,123, filed on Jun. 16, 2021.
(60) Provisional application No. 63/178,364, filed on Apr. 22, 2021.

(51) Int. Cl. C12N 9/22; C12N 15/11; C12N 15/90

(52) U.S. Cl. CPC C12N 9/22; C12N 15/11; C12N 15/907; C12N 2310/20; C12N 2800/80

(57) ABSTRACT

The present invention provides a non-naturally occurring composition comprising a CRISPR nuclease comprising a sequence having at least 95% identity to the amino acid sequence selected from the group consisting of SEQ ID NOs: 1-88 or a nucleic acid molecule comprising a sequence encoding the CRISPR nuclease.

[0001] This application claims the benefit of U.S. Provisional Application No. 63/211,123, filed Jun. 16, 2021, and U.S. Provisional Application No. 63/178,364, filed Apr. 22, 2021, the contents of each of which are hereby incorporated by reference.

[0002] Throughout this application, various publications are referenced, including referenced in parenthesis. The disclosures of all publications mentioned in this application in their entireties are hereby incorporated by reference into this application in order to provide additional description of the art to which this invention pertains and of the features in the art which can be employed with this invention.

### REFERENCE TO SEQUENCE LISTING

[0003] This application incorporates-by-reference nucleotide sequences which are present in the file named “220422_91721-A-PCT_Sequence_Listing_AWG.txt”, which is 2,291 kilobytes in size, and which was created on Apr. 22, 2022 in the IBM-PC machine format, having an operating system compatibility with MS-Windows, which is contained in the text file filed Apr. 22, 2022 as part of this application.

### FIELD OF THE INVENTION

[0004] The present invention is directed to, inter alia, composition and methods for genome editing.

### BACKGROUND OF THE INVENTION

[0005] The Clustered Regularly Interspaced Short Palindromic Repeat (CRISPR) systems of bacterial and archaeal adaptive immunity show extreme diversity of protein composition and genomic loci architecture. The CRISPR systems have become important tools for research and genome engineering. Nevertheless, many details of CRISPR systems have not been determined and the applicability of CRISPR nucleases may be limited by sequence specificity requirements, expression, or delivery challenges. Different CRISPR nucleases have diverse characteristics such as: size, PAM site, on target activity, specificity, cleavage pattern (e.g. blunt, staggered ends), and prominent pattern of indel formation following cleavage. Different sets of characteristics may be useful for different applications. For example, some CRISPR nucleases may be able to target particular genomic loci that other CRISPR nucleases cannot due to limitations of the PAM site. In addition, some CRISPR nucleases currently in use exhibit pre-immunity, which may limit in vivo applicability. See Charlesworth et al., Nature Medicine (2019) and Wagner et al., Nature Medicine (2019). Accordingly, discovery, engineering, and improvement of novel CRISPR nucleases is of importance.

### SUMMARY OF THE INVENTION

[0006] Disclosed herein are compositions and methods that may be utilized for genomic engineering, epigenomic engineering, genome targeting, genome editing of cells, and/or in vitro diagnostics.

[0007] The disclosed compositions may be utilized for modifying genomic DNA sequences. As used herein, genomic DNA refers to linear and/or chromosomal DNA and/or plasmid or other extrachromosomal DNA sequences present in the cell or cells of interest. In some embodiments, the cell of interest is a eukaryotic cell. In some embodiments, the cell of interest is a prokaryotic cell. In some embodiments, the methods produce double-stranded breaks (DSBs) or single-stranded breaks at pre-determined target sites in a genomic DNA sequence, resulting in mutation, insertion, and/or deletion of a DNA sequence at the target site(s) in a genome. In some embodiments, the DNA target site in a genome is in the nucleus of a cell.

[0008] Accordingly, in some embodiments, the compositions comprise a Clustered Regularly Interspaced Short Palindromic Repeat (CRISPR) nucleases. In some embodiments, the CRISPR nuclease is a CRISPR-associated protein.

### OMNI CRISPR Nucleases

[0009] Embodiments of the present invention provide for CRISPR nucleases designated as an “OMNI” nuclease as provided in Table 1.

[0010] This invention provides a non-naturally occurring composition comprising a CRISPR nuclease comprising a sequence having at least 95% identity to the amino acid sequence selected from the group consisting of SEQ ID NOs: 1-88 or a nucleic acid molecule comprising a sequence encoding the CRISPR nuclease.

[0011] This invention also provides a method of modifying a nucleotide sequence at a target site in the genome of a mammalian cell comprising introducing into the cell (i) a composition comprising a CRISPR nuclease having at least 95% identity to an amino acid sequence selected from the group consisting of SEQ ID NOs: 1-88 or a nucleic acid molecule comprising a sequence encoding a CRISPR nuclease which sequence has at least 95% identity to a nucleic acid sequence selected from the group consisting of SEQ ID NOs: 89-264 and (ii) a DNA-targeting RNA molecule, or a DNA polynucleotide encoding a DNA-targeting RNA molecule, comprising a nucleotide sequence that is complementary to a sequence in the target DNA.

[0012] This invention also provides a non-naturally occurring composition comprising a CRISPR associated system comprising:
[0013] a) one or more RNA molecules comprising a guide sequence portion linked to a direct repeat sequence, wherein the guide sequence is capable of hybridizing with a target sequence, or one or more nucleotide sequences encoding the one or more RNA molecules; and
[0014] b) a CRISPR nuclease comprising an amino acid sequence having at least 95% identity to the amino acid sequence selected from the group consisting of SEQ ID NOs: 1-88 or a nucleic acid molecule comprising a sequence encoding the CRISPR nuclease; and wherein the one or more RNA molecules hybridize to the target sequence, wherein the target sequence is adjacent to the 3′ end of a complimentary sequence of a Protospacer Adjacent Motif (PAM), and the one or more RNA molecules form a complex with the RNA-guided nuclease.

[0015] This invention also provides a non-naturally occurring composition comprising:
[0016] a) a CRISPR nuclease comprising a sequence having at least 95% identity to the amino acid sequence selected from the group consisting of SEQ ID NOs: 1-88 or a nucleic acid molecule comprising a sequence encoding the CRISPR nuclease; and
[0017] b) one or more RNA molecules, or one or more DNA polynucleotide encoding the one or more RNA molecules, comprising at least one of:
   [0018] i) a nuclease-binding RNA nucleotide sequence capable of interacting with/binding to the CRISPR nuclease; and
[0019] ii) a DNA-targeting RNA nucleotide sequence comprising a sequence complementary to a sequence in a target DNA sequence,
[0020] wherein the CRISPR nuclease is capable of complexing with the one or more RNA molecules to form a complex capable of hybridizing with the target DNA sequence.

### BRIEF DESCRIPTION OF THE DRAWINGS

[0021] FIGS. 1A-1C: The predicted secondary structure of single guide RNA (sgRNA) molecules are shown. The sequences of each structure are listed in Table 2. FIG. 1A: A representation of a sgRNA for OMNI-117, with the crRNA and tracrRNA portions of the sgRNA noted. FIG. 1B: Examples of V1 and V2 sgRNA designs for OMNI-140. FIG. 1C: Example of a V1 sgRNA design for OMNI-160. FIG. 1D: A representation of a V1 sgRNA design for OMNI-169, with the crRNA and tracrRNA portions of the sgRNA noted. FIG. 1E: A representation of a V2 sgRNA design for OMNI-169.

[0022] FIGS. 2-89C: In-vitro TXTL PAM depletion results for OMNI nucleases. Top panel: The PAM logo is a schematic representation of the ratio of the depleted site for each version of the tested sgRNA; Bottom panel: Depletion ratio (left, color coded numerical column) of specific PAM sequences (right) from the PAM plasmid library were calculated following NGS of the TXTL reaction. The calculation for each OMNI is based on a 4N window along the 8 bp sequence of the PAM library. The required PAM of the tested OMNI and the level of nuclease activity under the reaction conditions is inferred from the depletion ratio. FIG. 2: OMNI-140. FIG. 3: OMNI-150. FIG. 4: OMNI-151. FIG. 5: OMNI-152. FIG. 6: OMNI-153. FIG. 7: OMNI-154. FIG. 8: OMNI-155. FIG. 9: OMNI-156. FIG. 10: OMNI-157. FIG. 11: OMNI-158. FIG. 12: OMNI-160. FIG. 13: OMNI-161. FIG. 14: OMNI-162. FIG. 15: OMNI-163. FIG. 16: OMNI-164. FIG. 17: OMNI-165. FIG. 18: OMNI-167. FIG. 19: OMNI-168. FIG. 20: OMNI-169. FIG. 21: OMNI-170. FIG. 22: OMNI-171. FIG. 23: OMNI-172. FIG. 24: OMNI-173. FIG. 25: OMNI-174. FIG. 26: OMNI-175. FIG. 27: OMNI-176. FIG. 28: OMNI-177. FIG. 29: OMNI-180. FIG. 30: OMNI-181. FIG. 31: OMNI-182. FIG. 32: OMNI-183. FIG. 33: OMNI-184. FIG. 34: OMNI-185. FIG. 35: OMNI-186. FIG. 36: OMNI-187. FIG. 37: OMNI-188. FIG. 38: OMNI-191. FIG. 39: OMNI-192. FIG. 40: OMNI-193. FIG. 41: OMNI-194. FIG. 42: OMNI-195. FIG. 43: OMNI-196. FIG. 44: OMNI-197. FIG. 45: OMNI-198. FIG. 46: OMNI-200. FIG. 47: OMNI-201. FIG. 48: OMNI-203. FIG. 49: OMNI-205. FIG. 50: OMNI-206. FIG. 51: OMNI-207. FIG. 52: OMNI-208. FIG. 53: OMNI-209. FIG. 54: OMNI-211. FIG. 55: OMNI-212. FIG. 56: OMNI-213. FIG. 57: OMNI-214. FIG. 58: OMNI-215. FIG. 59: OMNI-216. FIG. 60: OMNI-217. FIG. 61: OMNI-219. FIG. 62: OMNI-220. FIG. 63: OMNI-222. FIG. 64: OMNI-223. FIG. 65: OMNI-226. FIG. 66: OMNI-227. FIG. 67: OMNI-229. FIG. 68: OMNI-231. FIG. 69: OMNI-232. FIG. 70: OMNI-233. FIG. 71: OMNI-234. FIG. 72: OMNI-235. FIG. 73: OMNI-236. FIG. 74: OMNI-238. FIG. 75: OMNI-239. FIG. 76: OMNI-240. FIG. 77: OMNI-241. FIG. 78: OMNI-242. FIG. 79: OMNI-243. FIG. 80: OMNI-244. FIG. 81: OMNI-245. FIG. 82: OMNI-247. FIG. 83: OMNI-250. FIG. 84: OMNI-254. FIG. 85: OMNI-256. FIG. 86: OMNI-257. FIG. 87: OMNI-260. FIG. 88: OMNI-262. FIGS. 89A-89C: OMNI-117 with sgRNA 1 (FIG. 89A); OMNI-117 with sgRNA 77 (FIG. 89B); OMNI-117 with sgRNA 78 (FIG. 89C).

### DETAILED DESCRIPTION

[0023] According to some aspects of the invention, the disclosed compositions comprise a Clustered Regularly Interspaced Short Palindromic Repeats (CRISPR) nuclease and/or a nucleic acid molecule comprising a sequence encoding the same.

[0024] Table 1 lists novel CRISPR nucleases, as well as substitutions at one or more positions within each nuclease which convert the nuclease to a nickase or catalytically dead nuclease.

[0025] Table 2 provides crRNA, tracrRNA, and single-guide RNA (sgRNA) sequences, and portions of crRNA, tracrRNA, and sgRNA sequences, that are compatible with each listed CRISPR nuclease. Accordingly, a crRNA molecule capable of binding and targeting an OMNI nuclease listed in Table 2 as part of a crRNA: tracrRNA complex may comprise any crRNA sequence listed in Table 2. Similarly, a tracrRNA molecule capable of binding and targeting an OMNI nuclease listed in Table 2 as part of a crRNA: tracrRNA complex may comprise any tracrRNA sequence listed in Table 2. Also, a single-guide RNA molecule capable of binding and targeting an OMNI nuclease listed in Table 2 may comprise any sequence listed in Table 2.

[0026] For example, a crRNA molecule of OMNI-140 nuclease (SEQ ID NO: 2) may comprise a sequence of any one of SEQ ID NOs: 279-28; a tracrRNA molecule of OMNI-140 nuclease may comprise a sequence of any one of SEQ ID NOs: 283-290 and 293; and a sgRNA molecule of OMNI-140 nuclease may comprise a sequence of any one of SEQ ID NOs: 279-293. Other crRNA molecules, tracrRNA molecules, or sgRNA molecules for each OMNI nuclease may be derived from the sequences listed in Table 2 in the same manner.

[0027] A non-naturally occurring composition comprising a CRISPR nuclease comprising a sequence having at least 90% identity to the amino acid sequence selected from the group consisting of SEQ ID NOs: 1-88, or a nucleic acid molecule comprising a sequence encoding the CRISPR nuclease.

[0028] The composition of claim 1, further comprising one or more RNA molecules, or a DNA polynucleotide encoding any one of the one or more RNA molecules, wherein the one or more RNA molecules and the CRISPR nuclease do not naturally occur together and the one or more RNA molecules are configured to form a complex with the CRISPR nuclease and/or target the complex to a target site.

[0029] In some embodiments, the CRISPR nuclease comprises a sequence having at least 90% identity to the amino acid sequence set forth in SEQ ID NO: 1, and at least one RNA molecule comprises a sequence selected from the group consisting of SEQ ID NOs: 265-278, 1330-1359, and UUAAAGUAA.

[0030] In some embodiments, the CRISPR nuclease comprises a sequence having at least 90% identity to the amino acid sequence set forth in SEQ ID NO: 1 and at least one RNA molecule is a CRISPR RNA (crRNA) molecule comprising a guide sequence portion and a sequence selected from the group consisting of SEQ ID NOs: 265-268, 277, 1330-1333, and 1346-1349.

[0031] In some embodiments, the composition further comprises a transactivating CRISPR RNA (tracrRNA) molecule comprising a sequence set forth in the group consisting of SEQ ID NOs: 269-274, 278, 1334-1342, 1345, 1350-1358, UUAAAGUAA.

[0032] In some embodiments, the CRISPR nuclease comprises a sequence having at least 90% identity to the amino acid sequence set forth in SEQ ID NO: 1 and at least one RNA molecule is a single-guide RNA (sgRNA) molecule comprising a guide sequence portion and a sequence selected from the group consisting of SEQ ID NOs: 265-278, 1330-1359, and UUAAAGUAA.

[0033] In some embodiments, the CRISPR nuclease comprises a sequence having at least 90% identity to the amino acid sequence set forth in SEQ ID NO: 2, and at least one RNA molecule comprises a sequence selected from the group consisting of SEQ ID NOs: 279-293.

[0034] In some embodiments, the CRISPR nuclease comprises a sequence having at least 90% identity to the amino acid sequence set forth in SEQ ID NO: 2 and at least one RNA molecule is a CRISPR RNA (crRNA) molecule comprising a guide sequence portion and a sequence selected from the group consisting of SEQ ID NOs: 279-282.

[0035] In some embodiments, the composition further comprises a transactivating CRISPR RNA (tracrRNA) molecule comprising a sequence set forth in the group consisting of SEQ ID NOs: 283-290 and 293.

[0036] In some embodiments, the CRISPR nuclease comprises a sequence having at least 90% identity to the amino acid sequence set forth in SEQ ID NO: 2 and at least one RNA molecule is a single-guide RNA (sgRNA) molecule comprising a guide sequence portion and a sequence selected from the group consisting of SEQ ID NOs: 279-293.

[0037] In some embodiments, the CRISPR nuclease comprises a sequence having at least 90% identity to the amino acid sequence set forth in SEQ ID NO: 3, and at least one RNA molecule comprises a sequence selected from the group consisting of SEQ ID NOs: 294-305.

[0038] In some embodiments, the CRISPR nuclease comprises a sequence having at least 90% identity to the amino acid sequence set forth in SEQ ID NO: 3 and at least one RNA molecule is a CRISPR RNA (crRNA) molecule comprising a guide sequence portion and a sequence selected from the group consisting of SEQ ID NOs: 294-297.

[0039] In some embodiments, the composition further comprises a transactivating CRISPR RNA (tracrRNA) molecule comprising a sequence set forth in the group consisting of SEQ ID NOs: 298-304.

[0040] In some embodiments, the CRISPR nuclease comprises a sequence having at least 90% identity to the amino acid sequence set forth in SEQ ID NO: 3 and at least one RNA molecule is a single-guide RNA (sgRNA) molecule comprising a guide sequence portion and a sequence selected from the group consisting of SEQ ID NOs: 294-305.

[0041] In some embodiments, the CRISPR nuclease comprises a sequence having at least 90% identity to the amino acid sequence set forth in SEQ ID NO: 4, and at least one RNA molecule comprises a sequence selected from the group consisting of SEQ ID NOs: 306-319.

[0042] In some embodiments, the CRISPR nuclease comprises a sequence having at least 90% identity to the amino acid sequence set forth in SEQ ID NO: 4 and at least one RNA molecule is a CRISPR RNA (crRNA) molecule comprising a guide sequence portion and a sequence selected from the group consisting of SEQ ID NOs: 306-309.

[0043] In some embodiments, the composition further comprises a transactivating CRISPR RNA (tracrRNA) molecule comprising a sequence set forth in the group consisting of SEQ ID NOs: 310-317.

[0044] In some embodiments, the CRISPR nuclease comprises a sequence having at least 90% identity to the amino acid sequence set forth in SEQ ID NO: 4 and at least one RNA molecule is a single-guide RNA (sgRNA) molecule comprising a guide sequence portion and a sequence selected from the group consisting of SEQ ID NOs: 306-319.

[0045] In some embodiments, the CRISPR nuclease comprises a sequence having at least 90% identity to the amino acid sequence set forth in SEQ ID NO: 5, and at least one RNA molecule comprises a sequence selected from the group consisting of SEQ ID NOs: 320-333.

[0046] In some embodiments, the CRISPR nuclease comprises a sequence having at least 90% identity to the amino acid sequence set forth in SEQ ID NO: 5 and at least one RNA molecule is a CRISPR RNA (crRNA) molecule comprising a guide sequence portion and a sequence selected from the group consisting of SEQ ID NOs: 320-323.

[0047] In some embodiments, the composition further comprises a transactivating CRISPR RNA (tracrRNA) molecule comprising a sequence set forth in the group consisting of SEQ ID NOs: 324-332.

[0048] In some embodiments, the CRISPR nuclease comprises a sequence having at least 90% identity to the amino acid sequence set forth in SEQ ID NO: 5 and at least one RNA molecule is a single-guide RNA (sgRNA) molecule comprising a guide sequence portion and a sequence selected from the group consisting of SEQ ID NOs: 320-333.

[0049] In some embodiments, the CRISPR nuclease comprises a sequence having at least 90% identity to the amino acid sequence set forth in SEQ ID NO: 6, and at least one RNA molecule comprises a sequence selected from the group consisting of SEQ ID NOs: 334-346.

[0050] In some embodiments, the CRISPR nuclease comprises a sequence having at least 90% identity to the amino acid sequence set forth in SEQ ID NO: 6 and at least one RNA molecule is a CRISPR RNA (crRNA) molecule comprising a guide sequence portion and a sequence selected from the group consisting of SEQ ID NOs: 334-337.

[0051] In some embodiments, the composition further comprises a transactivating CRISPR RNA (tracrRNA) molecule comprising a sequence set forth in the group consisting of SEQ ID NOs: 338-345.

[0052] In some embodiments, the CRISPR nuclease comprises a sequence having at least 90% identity to the amino acid sequence set forth in SEQ ID NO: 6 and at least one RNA molecule is a single-guide RNA (sgRNA) molecule comprising a guide sequence portion and a sequence selected from the group consisting of SEQ ID NOs: 334-346.

[0053] In some embodiments, the CRISPR nuclease comprises a sequence having at least 90% identity to the amino acid sequence set forth in SEQ ID NO: 7 or SEQ ID NO: 8, and at least one RNA molecule comprises a sequence selected from the group consisting of SEQ ID NOs: 347-358 and UAGUCGUU.

[0054] In some embodiments, the CRISPR nuclease comprises a sequence having at least 90% identity to the amino acid sequence set forth in SEQ ID NO: 7 or SEQ ID NO: 8 and at least one RNA molecule is a CRISPR RNA (crRNA) molecule comprising a guide sequence portion and a sequence selected from the group consisting of SEQ ID NOs: 347-350.

[0055] In some embodiments, the composition further comprises a transactivating CRISPR RNA (tracrRNA) molecule comprising a sequence set forth in the group consisting of SEQ ID NOs: 351-357 and UAGUCGUU.

[0056] In some embodiments, the CRISPR nuclease comprises a sequence having at least 90% identity to the amino acid sequence set forth in SEQ ID NO: 7 or SEQ ID NO: 8 and at least one RNA molecule is a single-guide RNA (sgRNA) molecule comprising a guide sequence portion and a sequence selected from the group consisting of SEQ ID NOs: 347-358 and UAGUCGUU.

[0057] In some embodiments, the CRISPR nuclease comprises a sequence having at least 90% identity to the amino acid sequence set forth in SEQ ID NO: 9, and at least one RNA molecule comprises a sequence selected from the group consisting of SEQ ID NOs: 359-370 and UAGUCGUU.

[0058] In some embodiments, the CRISPR nuclease comprises a sequence having at least 90% identity to the amino acid sequence set forth in SEQ ID NO: 9 and at least one RNA molecule is a CRISPR RNA (crRNA) molecule comprising a guide sequence portion and a sequence selected from the group consisting of SEQ ID NOs: 359-362.

[0059] In some embodiments, the composition further comprises a transactivating CRISPR RNA (tracrRNA) molecule comprising a sequence set forth in the group consisting of SEQ ID NOs: 363-369 and UAGUCGUU.

[0060] In some embodiments, the CRISPR nuclease comprises a sequence having at least 90% identity to the amino acid sequence set forth in SEQ ID NO: 9 and at least one RNA molecule is a single-guide RNA (sgRNA) molecule comprising a guide sequence portion and a sequence selected from the group consisting of SEQ ID NOs: 359-370 and UAGUCGUU.

[0061] In some embodiments, the CRISPR nuclease comprises a sequence having at least 90% identity to the amino acid sequence set forth in SEQ ID NO: 10, and at least one RNA molecule comprises a sequence selected from the group consisting of SEQ ID NOs: 371-383.

[0062] In some embodiments, the CRISPR nuclease comprises a sequence having at least 90% identity to the amino acid sequence set forth in SEQ ID NO: 10 and at least one RNA molecule is a CRISPR RNA (crRNA) molecule comprising a guide sequence portion and a sequence selected from the group consisting of SEQ ID NOs: 371-374.

[0063] In some embodiments, the composition further comprises a transactivating CRISPR RNA (tracrRNA) molecule comprising a sequence set forth in the group consisting of SEQ ID NOs: 375-382.

[0064] In some embodiments, the CRISPR nuclease comprises a sequence having at least 90% identity to the amino acid sequence set forth in SEQ ID NO: 10 and at least one RNA molecule is a single-guide RNA (sgRNA) molecule comprising a guide sequence portion and a sequence selected from the group consisting of SEQ ID NOs: 371-383.

[0065] In some embodiments, the CRISPR nuclease comprises a sequence having at least 90% identity to the amino acid sequence set forth in SEQ ID NO: 11, and at least one RNA molecule comprises a sequence selected from the group consisting of SEQ ID NOs: 384-395.

[0066] In some embodiments, the CRISPR nuclease comprises a sequence having at least 90% identity to the amino acid sequence set forth in SEQ ID NO: 11 and at least one RNA molecule is a CRISPR RNA (crRNA) molecule comprising a guide sequence portion and a sequence selected from the group consisting of SEQ ID NOs: 384-387.

[0067] In some embodiments, the composition further comprises a transactivating CRISPR RNA (tracrRNA) molecule comprising a sequence set forth in the group consisting of SEQ ID NOs: 388-394.

[0068] In some embodiments, the CRISPR nuclease comprises a sequence having at least 90% identity to the amino acid sequence set forth in SEQ ID NO: 11 and at least one RNA molecule is a single-guide RNA (sgRNA) molecule comprising a guide sequence portion and a sequence selected from the group consisting of SEQ ID NOs: 384-395.

[0069] In some embodiments, the CRISPR nuclease comprises a sequence having at least 90% identity to the amino acid sequence set forth in SEQ ID NO: 12, and at least one RNA molecule comprises a sequence selected from the group consisting of SEQ ID NOs: 396-409.

[0070] In some embodiments, the CRISPR nuclease comprises a sequence having at least 90% identity to the amino acid sequence set forth in SEQ ID NO: 12 and at least one RNA molecule is a CRISPR RNA (crRNA) molecule comprising a guide sequence portion and a sequence selected from the group consisting of SEQ ID NOs: 396-399.

[0071] In some embodiments, further comprises a transactivating CRISPR RNA (tracrRNA) molecule comprising a sequence set forth in the group consisting of SEQ ID NOs: 400-408.

[0072] In some embodiments, the CRISPR nuclease comprises a sequence having at least 90% identity to the amino acid sequence set forth in SEQ ID NO: 12 and at least one RNA molecule is a single-guide RNA (sgRNA) molecule comprising a guide sequence portion and a sequence selected from the group consisting of SEQ ID NOs: 396-409.

[0073] In some embodiments, the CRISPR nuclease comprises a sequence having at least 90% identity to the amino acid sequence set forth in SEQ ID NO: 13, and at least one RNA molecule comprises a sequence selected from the group consisting of SEQ ID NOs: 410-423.

[0074] In some embodiments, the CRISPR nuclease comprises a sequence having at least 90% identity to the amino acid sequence set forth in SEQ ID NO: 13 and at least one RNA molecule is a CRISPR RNA (crRNA) molecule comprising a guide sequence portion and a sequence selected from the group consisting of SEQ ID NOs: 410-413.

[0075] In some embodiments, the composition further comprises a transactivating CRISPR RNA (tracrRNA) molecule comprising a sequence set forth in the group consisting of SEQ ID NOs: 414-422.

[0076] In some embodiments, the CRISPR nuclease comprises a sequence having at least 90% identity to the amino acid sequence set forth in SEQ ID NO: 13 and at least one RNA molecule is a single-guide RNA (sgRNA) molecule comprising a guide sequence portion and a sequence selected from the group consisting of SEQ ID NOs: 410-423.

[0077] In some embodiments, the CRISPR nuclease comprises a sequence having at least 90% identity to the amino acid sequence set forth in SEQ ID NO: 14, and at least one RNA molecule comprises a sequence selected from the group consisting of SEQ ID NOs: 424-442.

[0078] In some embodiments, the CRISPR nuclease comprises a sequence having at least 90% identity to the amino acid sequence set forth in SEQ ID NO: 14 and at least one RNA molecule is a CRISPR RNA (crRNA) molecule comprising a guide sequence portion and a sequence selected from the group consisting of SEQ ID NOs: 424-427 and 438.

[0079] In some embodiments, the composition further comprises a transactivating CRISPR RNA (tracrRNA) molecule comprising a sequence set forth in the group consisting of SEQ ID NOs: 428-435 and 439-442.

[0080] In some embodiments, the CRISPR nuclease comprises a sequence having at least 90% identity to the amino acid sequence set forth in SEQ ID NO: 14 and at least one RNA molecule is a single-guide RNA (sgRNA) molecule comprising a guide sequence portion and a sequence selected from the group consisting of SEQ ID NOs: 424-442.

[0081] In some embodiments, the CRISPR nuclease comprises a sequence having at least 90% identity to the amino acid sequence set forth in SEQ ID NO: 15, and at least one RNA molecule comprises a sequence selected from the group consisting of SEQ ID NOs: 443-459.

[0082] In some embodiments, the CRISPR nuclease comprises a sequence having at least 90% identity to the amino acid sequence set forth in SEQ ID NO: 15 and at least one RNA molecule is a CRISPR RNA (crRNA) molecule comprising a guide sequence portion and a sequence selected from the group consisting of SEQ ID NOs: 443-446 and 458.

[0083] In some embodiments, the composition further comprising a transactivating CRISPR RNA (tracrRNA) molecule comprising a sequence set forth in the group consisting of SEQ ID NOs: 447-455 and 459.

[0084] In some embodiments, the CRISPR nuclease comprises a sequence having at least 90% identity to the amino acid sequence set forth in SEQ ID NO: 15 and at least one RNA molecule is a single-guide RNA (sgRNA) molecule comprising a guide sequence portion and a sequence selected from the group consisting of SEQ ID NOs: 443-459.

[0085] In some embodiments, the CRISPR nuclease comprises a sequence having at least 90% identity to the amino acid sequence set forth in SEQ ID NO: 16, and at least one RNA molecule comprises a sequence selected from the group consisting of SEQ ID NOs: 460-473.

[0086] In some embodiments, the CRISPR nuclease comprises a sequence having at least 90% identity to the amino acid sequence set forth in SEQ ID NO: 16 and at least one RNA molecule is a CRISPR RNA (crRNA) molecule comprising a guide sequence portion and a sequence selected from the group consisting of SEQ ID NOs: 460-463.

[0087] In some embodiments, further comprises a transactivating CRISPR RNA (tracrRNA) molecule comprising a sequence set forth in the group consisting of SEQ ID NOs: 464-472.

[0088] In some embodiments, the CRISPR nuclease comprises a sequence having at least 90% identity to the amino acid sequence set forth in SEQ ID NO: 16 and at least one RNA molecule is a single-guide RNA (sgRNA) molecule comprising a guide sequence portion and a sequence selected from the group consisting of SEQ ID NOs: 460-473.

[0089] In some embodiments, the CRISPR nuclease comprises a sequence having at least 90% identity to the amino acid sequence set forth in SEQ ID NO: 17, and at least one RNA molecule comprises a sequence selected from the group consisting of SEQ ID NOs: 474-487.

[0090] In some embodiments, the CRISPR nuclease comprises a sequence having at least 90% identity to the amino acid sequence set forth in SEQ ID NO: 17 and at least one RNA molecule is a CRISPR RNA (crRNA) molecule comprising a guide sequence portion and a sequence selected from the group consisting of SEQ ID NOs: 474-477.

[0091] In some embodiments, the composition further comprises a transactivating CRISPR RNA (tracrRNA) molecule comprising a sequence set forth in the group consisting of SEQ ID NOs: 478-486.

[0092] In some embodiments, the CRISPR nuclease comprises a sequence having at least 90% identity to the amino acid sequence set forth in SEQ ID NO: 17 and at least one RNA molecule is a single-guide RNA (sgRNA) molecule comprising a guide sequence portion and a sequence selected from the group consisting of SEQ ID NOs: 474-487.

[0093] In some embodiments, the CRISPR nuclease comprises a sequence having at least 90% identity to the amino acid sequence set forth in SEQ ID NO: 18, and at least one RNA molecule comprises a sequence selected from the group consisting of SEQ ID NOs: 488-501.

[0094] In some embodiments, the CRISPR nuclease comprises a sequence having at least 90% identity to the amino acid sequence set forth in SEQ ID NO: 18 and at least one RNA molecule is a CRISPR RNA (crRNA) molecule comprising a guide sequence portion and a sequence selected from the group consisting of SEQ ID NOs: 488-491.

[0095] In some embodiments, the composition further comprises a transactivating CRISPR RNA (tracrRNA) molecule comprising a sequence set forth in the group consisting of SEQ ID NOs: 492-500.

[0096] In some embodiments, the CRISPR nuclease comprises a sequence having at least 90% identity to the amino acid sequence set forth in SEQ ID NO: 18 and at least one RNA molecule is a single-guide RNA (sgRNA) molecule comprising a guide sequence portion and a sequence selected from the group consisting of SEQ ID NOs: 488-501.

[0097] In some embodiments, the CRISPR nuclease comprises a sequence having at least 90% identity to the amino acid sequence set forth in SEQ ID NO: 19, and at least one RNA molecule comprises a sequence selected from the group consisting of SEQ ID NOs: 502-515.

[0098] In some embodiments, the CRISPR nuclease comprises a sequence having at least 90% identity to the amino acid sequence set forth in SEQ ID NO: 19 and at least one RNA molecule is a CRISPR RNA (crRNA) molecule comprising a guide sequence portion and a sequence selected from the group consisting of SEQ ID NOs: 502-505.

[0099] In some embodiments, the composition further comprises a transactivating CRISPR RNA (tracrRNA) molecule comprising a sequence set forth in the group consisting of SEQ ID NOs: 506-514.

[0100] In some embodiments, the CRISPR nuclease comprises a sequence having at least 90% identity to the amino acid sequence set forth in SEQ ID NO: 19 and at least one RNA molecule is a single-guide RNA (sgRNA) molecule comprising a guide sequence portion and a sequence selected from the group consisting of SEQ ID NOs: 502-515.

[0101] In some embodiments, the CRISPR nuclease comprises a sequence having at least 90% identity to the amino acid sequence set forth in SEQ ID NO: 20, and at least one RNA molecule comprises a sequence selected from the group consisting of SEQ ID NOs: 516-531.

[0102] In some embodiments, the CRISPR nuclease comprises a sequence having at least 90% identity to the amino acid sequence set forth in SEQ ID NO: 20 and at least one RNA molecule is a CRISPR RNA (crRNA) molecule comprising a guide sequence portion and a sequence selected from the group consisting of SEQ ID NOs: 516-519.

[0103] In some embodiments, the composition further comprises a transactivating CRISPR RNA (tracrRNA) molecule comprising a sequence set forth in the group consisting of SEQ ID NOs: 520-528 and 531.

[0104] In some embodiments, the CRISPR nuclease comprises a sequence having at least 90% identity to the amino acid sequence set forth in SEQ ID NO: 20 and at least one RNA molecule is a single-guide RNA (sgRNA) molecule comprising a guide sequence portion and a sequence selected from the group consisting of SEQ ID NOs: 516-531.

[0105] In some embodiments, the CRISPR nuclease comprises a sequence having at least 90% identity to the amino acid sequence set forth in SEQ ID NO: 21, and at least one RNA molecule comprises a sequence selected from the group consisting of SEQ ID NOs: 532-546.

[0106] In some embodiments, the CRISPR nuclease comprises a sequence having at least 90% identity to the amino acid sequence set forth in SEQ ID NO: 21 and at least one RNA molecule is a CRISPR RNA (crRNA) molecule comprising a guide sequence portion and a sequence selected from the group consisting of SEQ ID NOs: 532-535.

[0107] In some embodiments, the composition further comprises a transactivating CRISPR RNA (tracrRNA) molecule comprising a sequence set forth in the group consisting of SEQ ID NOs: 536-543 and 546.

[0108] In some embodiments, the CRISPR nuclease comprises a sequence having at least 90% identity to the amino acid sequence set forth in SEQ ID NO: 21 and at least one RNA molecule is a single-guide RNA (sgRNA) molecule comprising a guide sequence portion and a sequence selected from the group consisting of SEQ ID NOs: 532-546.

[0109] In some embodiments, the CRISPR nuclease comprises a sequence having at least 90% identity to the amino acid sequence set forth in SEQ ID NO: 22, SEQ ID NO: 23, SEQ ID NO: 24, SEQ ID NO: 25, or SEQ ID NO: 27 and at least one RNA molecule comprises a sequence selected from the group consisting of SEQ ID NOs: 547-560.

[0110] In some embodiments, the CRISPR nuclease comprises a sequence having at least 90% identity to the amino acid sequence set forth in SEQ ID NO: 22, SEQ ID NO: 23, SEQ ID NO: 24, SEQ ID NO: 25, or SEQ ID NO: 27 and at least one RNA molecule is a CRISPR RNA (crRNA) molecule comprising a guide sequence portion and a sequence selected from the group consisting of SEQ ID NOs: 547-550.

[0111] In some embodiments, the composition further comprises a transactivating CRISPR RNA (tracrRNA) molecule comprising a sequence set forth in the group consisting of SEQ ID NOs: 551-559.

[0112] In some embodiments, the CRISPR nuclease comprises a sequence having at least 90% identity to the amino acid sequence set forth in SEQ ID NO: 22, SEQ ID NO: 23, SEQ ID NO: 24, SEQ ID NO: 25, or SEQ ID NO: 27 and at least one RNA molecule is a single-guide RNA (sgRNA) molecule comprising a guide sequence portion and a sequence selected from the group consisting of SEQ ID NOs: 547-560.

[0113] In some embodiments, the CRISPR nuclease comprises a sequence having at least 90% identity to the amino acid sequence set forth in SEQ ID NO: 27, and at least one RNA molecule comprises a sequence selected from the group consisting of SEQ ID NOs: 561-576.

[0114] In some embodiments, the CRISPR nuclease comprises a sequence having at least 90% identity to the amino acid sequence set forth in SEQ ID NO: 27 and at least one RNA molecule is a CRISPR RNA (crRNA) molecule comprising a guide sequence portion and a sequence selected from the group consisting of SEQ ID NOs: 561-564 and 575.

[0115] In some embodiments, the composition further comprises a transactivating CRISPR RNA (tracrRNA) molecule comprising a sequence set forth in the group consisting of SEQ ID NOs: 565-572 and 576.

[0116] In some embodiments, the CRISPR nuclease comprises a sequence having at least 90% identity to the amino acid sequence set forth in SEQ ID NO: 27 and at least one RNA molecule is a single-guide RNA (sgRNA) molecule comprising a guide sequence portion and a sequence selected from the group consisting of SEQ ID NOs: 561-576.

[0117] In some embodiments, the CRISPR nuclease comprises a sequence having at least 90% identity to the amino acid sequence set forth in SEQ ID NO: 28, and at least one RNA molecule comprises a sequence selected from the group consisting of SEQ ID NOs: 577-590.

[0118] In some embodiments, the CRISPR nuclease comprises a sequence having at least 90% identity to the amino acid sequence set forth in SEQ ID NO: 28 and at least one RNA molecule is a CRISPR RNA (crRNA) molecule comprising a guide sequence portion and a sequence selected from the group consisting of SEQ ID NOs: 577-580.

[0119] In some embodiments, the composition further comprises a transactivating CRISPR RNA (tracrRNA) molecule comprising a sequence set forth in the group consisting of SEQ ID NOs: 581-589.

[0120] In some embodiments, the CRISPR nuclease comprises a sequence having at least 90% identity to the amino acid sequence set forth in SEQ ID NO: 28 and at least one RNA molecule is a single-guide RNA (sgRNA) molecule comprising a guide sequence portion and a sequence selected from the group consisting of SEQ ID NOs: 577-590.

[0121] In some embodiments, the CRISPR nuclease comprises a sequence having at least 90% identity to the amino acid sequence set forth in SEQ ID NO: 29 or SEQ ID NO: 30, and at least one RNA molecule comprises a sequence selected from the group consisting of SEQ ID NOs: 591-618.

[0122] In some embodiments, the CRISPR nuclease comprises a sequence having at least 90% identity to the amino acid sequence set forth in SEQ ID NO: 29 or SEQ ID NO: 30 and at least one RNA molecule is a CRISPR RNA (crRNA) molecule comprising a guide sequence portion and a sequence selected from the group consisting of SEQ ID NOs: 591-594 and 605-608.

[0123] In some embodiments, the composition further comprises a transactivating CRISPR RNA (tracrRNA) molecule comprising a sequence set forth in the group consisting of SEQ ID NOs: 595-603 and 609-617.

[0124] In some embodiments, the CRISPR nuclease comprises a sequence having at least 90% identity to the amino acid sequence set forth in SEQ ID NO: 29 or SEQ ID NO: 30 and at least one RNA molecule is a single-guide RNA (sgRNA) molecule comprising a guide sequence portion and a sequence selected from the group consisting of SEQ ID NOs: 591-618.

[0125] In some embodiments, the CRISPR nuclease comprises a sequence having at least 90% identity to the amino acid sequence set forth in SEQ ID NO: 31, and at least one RNA molecule comprises a sequence selected from the group consisting of SEQ ID NOs: 619-633.

[0126] In some embodiments, the CRISPR nuclease comprises a sequence having at least 90% identity to the amino acid sequence set forth in SEQ ID NO: 31 and at least one RNA molecule is a CRISPR RNA (crRNA) molecule comprising a guide sequence portion and a sequence selected from the group consisting of SEQ ID NOs: 619-622.

[0127] In some embodiments, the composition further comprises a transactivating CRISPR RNA (tracrRNA) molecule comprising a sequence set forth in the group consisting of SEQ ID NOs: 623-630 and 633.

[0128] In some embodiments, the CRISPR nuclease comprises a sequence having at least 90% identity to the amino acid sequence set forth in SEQ ID NO: 31 and at least one RNA molecule is a single-guide RNA (sgRNA) molecule comprising a guide sequence portion and a sequence selected from the group consisting of SEQ ID NOs: 619-633.

[0129] In some embodiments, the CRISPR nuclease comprises a sequence having at least 90% identity to the amino acid sequence set forth in SEQ ID NO: 32, and at least one RNA molecule comprises a sequence selected from the group consisting of SEQ ID NOs: 634-650.

[0130] In some embodiments, the CRISPR nuclease comprises a sequence having at least 90% identity to the amino acid sequence set forth in SEQ ID NO: 32 and at least one RNA molecule is a CRISPR RNA (crRNA) molecule comprising a guide sequence portion and a sequence selected from the group consisting of SEQ ID NOs: 634-637 and 649.

[0131] In some embodiments, the composition further comprises a transactivating CRISPR RNA (tracrRNA) molecule comprising a sequence set forth in the group consisting of SEQ ID NOs: 638-646 and 650.

[0132] In some embodiments, the CRISPR nuclease comprises a sequence having at least 90% identity to the amino acid sequence set forth in SEQ ID NO: 32 and at least one RNA molecule is a single-guide RNA (sgRNA) molecule comprising a guide sequence portion and a sequence selected from the group consisting of SEQ ID NOs: 634-650.

[0133] In some embodiments, the CRISPR nuclease comprises a sequence having at least 90% identity to the amino acid sequence set forth in SEQ ID NO: 33, and at least one RNA molecule comprises a sequence selected from the group consisting of SEQ ID NOs: 651-664.

[0134] In some embodiments, the CRISPR nuclease comprises a sequence having at least 90% identity to the amino acid sequence set forth in SEQ ID NO: 33 and at least one RNA molecule is a CRISPR RNA (crRNA) molecule comprising a guide sequence portion and a sequence selected from the group consisting of SEQ ID NOs: 651-654.

[0135] In some embodiments, the composition further comprises a transactivating CRISPR RNA (tracrRNA) molecule comprising a sequence set forth in the group consisting of SEQ ID NOs: 655-663.

[0136] In some embodiments, the CRISPR nuclease comprises a sequence having at least 90% identity to the amino acid sequence set forth in SEQ ID NO: 33 and at least one RNA molecule is a single-guide RNA (sgRNA) molecule comprising a guide sequence portion and a sequence selected from the group consisting of SEQ ID NOs: 651-664.

[0137] In some embodiments, the CRISPR nuclease comprises a sequence having at least 90% identity to the amino acid sequence set forth in SEQ ID NO: 34 or SEQ ID NO: 35, and at least one RNA molecule comprises a sequence selected from the group consisting of SEQ ID NOs: 665-676.

[0138] In some embodiments, the CRISPR nuclease comprises a sequence having at least 90% identity to the amino acid sequence set forth in SEQ ID NO: 34 or SEQ ID NO: 35 and at least one RNA molecule is a CRISPR RNA (crRNA) molecule comprising a guide sequence portion and a sequence selected from the group consisting of SEQ ID NOs: 665-668.

[0139] In some embodiments, the composition further comprises a transactivating CRISPR RNA (tracrRNA) molecule comprising a sequence set forth in the group consisting of SEQ ID NOs: 669-675.

[0140] In some embodiments, the CRISPR nuclease comprises a sequence having at least 90% identity to the amino acid sequence set forth in SEQ ID NO: 34 or SEQ ID NO: 35 and at least one RNA molecule is a single-guide RNA (sgRNA) molecule comprising a guide sequence portion and a sequence selected from the group consisting of SEQ ID NOs: 665-676.

[0141] In some embodiments, the CRISPR nuclease comprises a sequence having at least 90% identity to the amino acid sequence set forth in SEQ ID NO: 36 or SEQ ID NO: 37, and at least one RNA molecule comprises a sequence selected from the group consisting of SEQ ID NOs: 677-700.

[0142] In some embodiments, the CRISPR nuclease comprises a sequence having at least 90% identity to the amino acid sequence set forth in SEQ ID NO: 36 or SEQ ID NO: 37 and at least one RNA molecule is a CRISPR RNA (crRNA) molecule comprising a guide sequence portion and a sequence selected from the group consisting of SEQ ID NOs: 677-680 and 689-692.

[0143] In some embodiments, the composition further comprises a transactivating CRISPR RNA (tracrRNA) molecule comprising a sequence set forth in the group consisting of SEQ ID NOs: 681-687 and 693-699.

[0144] In some embodiments, the CRISPR nuclease comprises a sequence having at least 90% identity to the amino acid sequence set forth in SEQ ID NO: 36 or SEQ ID NO: 37 and at least one RNA molecule is a single-guide RNA (sgRNA) molecule comprising a guide sequence portion and a sequence selected from the group consisting of SEQ ID NOs: 677-700.

[0145] In some embodiments, the CRISPR nuclease comprises a sequence having at least 90% identity to the amino acid sequence set forth in SEQ ID NO: 38, SEQ ID NO: 39 or SEQ ID NO: 40, and at least one RNA molecule comprises a sequence selected from the group consisting of SEQ ID NOs: 701-715.

[0146] In some embodiments, the CRISPR nuclease comprises a sequence having at least 90% identity to the amino acid sequence set forth in SEQ ID NO: 38, SEQ ID NO: 39 or SEQ ID NO: 40 and at least one RNA molecule is a CRISPR RNA (crRNA) molecule comprising a guide sequence portion and a sequence selected from the group consisting of SEQ ID NOs: 701-704.

[0147] In some embodiments, the composition further comprises a transactivating CRISPR RNA (tracrRNA) molecule comprising a sequence set forth in the group consisting of SEQ ID NOs: 705-712 and 715.

[0148] In some embodiments, the CRISPR nuclease comprises a sequence having at least 90% identity to the amino acid sequence set forth in SEQ ID NO: 38, SEQ ID NO: 39 or SEQ ID NO: 40 and at least one RNA molecule is a single-guide RNA (sgRNA) molecule comprising a guide sequence portion and a sequence selected from the group consisting of SEQ ID NOs: 701-715.

[0149] In some embodiments, the CRISPR nuclease comprises a sequence having at least 90% identity to the amino acid sequence set forth in SEQ ID NO: 41 or SEQ ID NO: 42, and at least one RNA molecule comprises a sequence selected from the group consisting of SEQ ID NOs: 716-743.

[0150] In some embodiments, the CRISPR nuclease comprises a sequence having at least 90% identity to the amino acid sequence set forth in SEQ ID NO: 41 or SEQ ID NO: 42 and at least one RNA molecule is a CRISPR RNA (crRNA) molecule comprising a guide sequence portion and a sequence selected from the group consisting of SEQ ID NOs: 716-719 and 730-733.

[0151] In some embodiments, the composition further comprises a transactivating CRISPR RNA (tracrRNA) molecule comprising a sequence set forth in the group consisting of SEQ ID NOs: 720-728 and 734-742.

[0152] In some embodiments, the CRISPR nuclease comprises a sequence having at least 90% identity to the amino acid sequence set forth in SEQ ID NO: 41 or SEQ ID NO: 42 and at least one RNA molecule is a single-guide RNA (sgRNA) molecule comprising a guide sequence portion and a sequence selected from the group consisting of SEQ ID NOs: 716-743.

[0153] In some embodiments, the CRISPR nuclease comprises a sequence having at least 90% identity to the amino acid sequence set forth in SEQ ID NO: 43, and at least one RNA molecule comprises a sequence selected from the group consisting of SEQ ID NOs: 744-759.

[0154] In some embodiments, the CRISPR nuclease comprises a sequence having at least 90% identity to the amino acid sequence set forth in SEQ ID NO: 43 and at least one RNA molecule is a CRISPR RNA (crRNA) molecule comprising a guide sequence portion and a sequence selected from the group consisting of SEQ ID NOs: 744-747.

[0155] In some embodiments, the composition further comprises a transactivating CRISPR RNA (tracrRNA) molecule comprising a sequence set forth in the group consisting of SEQ ID NOs: 748-756 and 759.

[0156] In some embodiments, the CRISPR nuclease comprises a sequence having at least 90% identity to the amino acid sequence set forth in SEQ ID NO: 43 and at least one RNA molecule is a single-guide RNA (sgRNA) molecule comprising a guide sequence portion and a sequence selected from the group consisting of SEQ ID NOs: 744-759.

[0157] In some embodiments, the CRISPR nuclease comprises a sequence having at least 90% identity to the amino acid sequence set forth in SEQ ID NO: 44, and at least one RNA molecule comprises a sequence selected from the group consisting of SEQ ID NOs: 760-775.

[0158] In some embodiments, the CRISPR nuclease comprises a sequence having at least 90% identity to the amino acid sequence set forth in SEQ ID NO: 44 and at least one RNA molecule is a CRISPR RNA (crRNA) molecule comprising a guide sequence portion and a sequence selected from the group consisting of SEQ ID NOs: 760-763.

[0159] In some embodiments, the composition further comprises a transactivating CRISPR RNA (tracrRNA) molecule comprising a sequence set forth in the group consisting of SEQ ID NOs: 764-772 and 775.

[0160] In some embodiments, the CRISPR nuclease comprises a sequence having at least 90% identity to the amino acid sequence set forth in SEQ ID NO: 44 and at least one RNA molecule is a single-guide RNA (sgRNA) molecule comprising a guide sequence portion and a sequence selected from the group consisting of SEQ ID NOs: 760-775.

[0161] In some embodiments, the CRISPR nuclease comprises a sequence having at least 90% identity to the amino acid sequence set forth in SEQ ID NO: 45, and at least one RNA molecule comprises a sequence selected from the group consisting of SEQ ID NOs: 776-788.

[0162] In some embodiments, the CRISPR nuclease comprises a sequence having at least 90% identity to the amino acid sequence set forth in SEQ ID NO: 45 and at least one RNA molecule is a CRISPR RNA (crRNA) molecule comprising a guide sequence portion and a sequence selected from the group consisting of SEQ ID NOs: 776-779.

[0163] In some embodiments, the composition further comprises a transactivating CRISPR RNA (tracrRNA) molecule comprising a sequence set forth in the group consisting of SEQ ID NOs: 780-787.

[0164] In some embodiments, the CRISPR nuclease comprises a sequence having at least 90% identity to the amino acid sequence set forth in SEQ ID NO: 45 and at least one RNA molecule is a single-guide RNA (sgRNA) molecule comprising a guide sequence portion and a sequence selected from the group consisting of SEQ ID NOs: 776-788.

[0165] In some embodiments, the CRISPR nuclease comprises a sequence having at least 90% identity to the amino acid sequence set forth in SEQ ID NO: 46, and at least one RNA molecule comprises a sequence selected from the group consisting of SEQ ID NOs: 789-800.

[0166] In some embodiments, the CRISPR nuclease comprises a sequence having at least 90% identity to the amino acid sequence set forth in SEQ ID NO: 46 and at least one RNA molecule is a CRISPR RNA (crRNA) molecule comprising a guide sequence portion and a sequence selected from the group consisting of SEQ ID NOs: 789-792.

[0167] In some embodiments, the composition further comprises a transactivating CRISPR RNA (tracrRNA) molecule comprising a sequence set forth in the group consisting of SEQ ID NOs: 793-799.

[0168] In some embodiments, the CRISPR nuclease comprises a sequence having at least 90% identity to the amino acid sequence set forth in SEQ ID NO: 46 and at least one RNA molecule is a single-guide RNA (sgRNA) molecule comprising a guide sequence portion and a sequence selected from the group consisting of SEQ ID NOs: 789-800.

[0169] In some embodiments, the CRISPR nuclease comprises a sequence having at least 90% identity to the amino acid sequence set forth in SEQ ID NO: 47, and at least one RNA molecule comprises a sequence selected from the group consisting of SEQ ID NOs: 801-812.

[0170] In some embodiments, the CRISPR nuclease comprises a sequence having at least 90% identity to the amino acid sequence set forth in SEQ ID NO: 47 and at least one RNA molecule is a CRISPR RNA (crRNA) molecule comprising a guide sequence portion and a sequence selected from the group consisting of SEQ ID NOs: 801-804.

[0171] In some embodiments, the composition further comprises a transactivating CRISPR RNA (tracrRNA) molecule comprising a sequence set forth in the group consisting of SEQ ID NOs: 805-811.

[0172] In some embodiments, the CRISPR nuclease comprises a sequence having at least 90% identity to the amino acid sequence set forth in SEQ ID NO: 47 and at least one RNA molecule is a single-guide RNA (sgRNA) molecule comprising a guide sequence portion and a sequence selected from the group consisting of SEQ ID NOs: 801-812.

[0173] In some embodiments, the CRISPR nuclease comprises a sequence having at least 90% identity to the amino acid sequence set forth in SEQ ID NO: 48, and at least one RNA molecule comprises a sequence selected from the group consisting of SEQ ID NOs: 813-825.

[0174] In some embodiments, the CRISPR nuclease comprises a sequence having at least 90% identity to the amino acid sequence set forth in SEQ ID NO: 48 and at least one RNA molecule is a CRISPR RNA (crRNA) molecule comprising a guide sequence portion and a sequence selected from the group consisting of SEQ ID NOs: 813-816.

[0175] In some embodiments, further comprising a transactivating CRISPR RNA (tracrRNA) molecule comprising a sequence set forth in the group consisting of SEQ ID NOs: 817-824.

[0176] In some embodiments, the CRISPR nuclease comprises a sequence having at least 90% identity to the amino acid sequence set forth in SEQ ID NO: 48 and at least one RNA molecule is a single-guide RNA (sgRNA) molecule comprising a guide sequence portion and a sequence selected from the group consisting of SEQ ID NOs: 813-825.

[0177] In some embodiments, the CRISPR nuclease comprises a sequence having at least 90% identity to the amino acid sequence set forth in SEQ ID NO: 49, and at least one RNA molecule comprises a sequence selected from the group consisting of SEQ ID NOs: 826-837.

[0178] In some embodiments, the CRISPR nuclease comprises a sequence having at least 90% identity to the amino acid sequence set forth in SEQ ID NO: 49 and at least one RNA molecule is a CRISPR RNA (crRNA) molecule comprising a guide sequence portion and a sequence selected from the group consisting of SEQ ID NOs: 826-829.

[0179] In some embodiments, the composition further comprises a transactivating CRISPR RNA (tracrRNA) molecule comprising a sequence set forth in the group consisting of SEQ ID NOs: 830-836

[0180] In some embodiments, the CRISPR nuclease comprises a sequence having at least 90% identity to the amino acid sequence set forth in SEQ ID NO: 49 and at least one RNA molecule is a single-guide RNA (sgRNA) molecule comprising a guide sequence portion and a sequence selected from the group consisting of SEQ ID NOs: 826-837.

[0181] In some embodiments, the CRISPR nuclease comprises a sequence having at least 90% identity to the amino acid sequence set forth in SEQ ID NO: 50, and at least one RNA molecule comprises a sequence selected from the group consisting of SEQ ID NOs: 838-849.

[0182] In some embodiments, the CRISPR nuclease comprises a sequence having at least 90% identity to the amino acid sequence set forth in SEQ ID NO: 50 and at least one RNA molecule is a CRISPR RNA (crRNA) molecule comprising a guide sequence portion and a sequence selected from the group consisting of SEQ ID NOs: 838-841.

[0183] In some embodiments, the composition further comprises a transactivating CRISPR RNA (tracrRNA) molecule comprising a sequence set forth in the group consisting of SEQ ID NOs: 842-848.

[0184] In some embodiments, the CRISPR nuclease comprises a sequence having at least 90% identity to the amino acid sequence set forth in SEQ ID NO: 50 and at least one RNA molecule is a single-guide RNA (sgRNA) molecule comprising a guide sequence portion and a sequence selected from the group consisting of SEQ ID NOs: 838-849.

[0185] In some embodiments, the CRISPR nuclease comprises a sequence having at least 90% identity to the amino acid sequence set forth in SEQ ID NO: 51, and at least one RNA molecule comprises a sequence selected from the group consisting of SEQ ID NOs: 850-863.

[0186] In some embodiments, the CRISPR nuclease comprises a sequence having at least 90% identity to the amino acid sequence set forth in SEQ ID NO: 51 and at least one RNA molecule is a CRISPR RNA (crRNA) molecule comprising a guide sequence portion and a sequence selected from the group consisting of SEQ ID NOs: 850-853.

[0187] In some embodiments, the composition further comprises a transactivating CRISPR RNA (tracrRNA) molecule comprising a sequence set forth in the group consisting of SEQ ID NOs: 854-862.

[0188] In some embodiments, the CRISPR nuclease comprises a sequence having at least 90% identity to the amino acid sequence set forth in SEQ ID NO: 51 and at least one RNA molecule is a single-guide RNA (sgRNA) molecule comprising a guide sequence portion and a sequence selected from the group consisting of SEQ ID NOs: 850-863.

[0189] In some embodiments, the CRISPR nuclease comprises a sequence having at least 90% identity to the amino acid sequence set forth in SEQ ID NO: 52, and at least one RNA molecule comprises a sequence selected from the group consisting of SEQ ID NOs: 864-877.

[0190] In some embodiments, the CRISPR nuclease comprises a sequence having at least 90% identity to the amino acid sequence set forth in SEQ ID NO: 52 and at least one RNA molecule is a CRISPR RNA (crRNA) molecule comprising a guide sequence portion and a sequence selected from the group consisting of SEQ ID NOs: 864-867.

[0191] In some embodiments, the composition further comprising a transactivating CRISPR RNA (tracrRNA) molecule comprising a sequence set forth in the group consisting of SEQ ID NOs: 868-876.

[0192] In some embodiments, the CRISPR nuclease comprises a sequence having at least 90% identity to the amino acid sequence set forth in SEQ ID NO: 52 and at least one RNA molecule is a single-guide RNA (sgRNA) molecule comprising a guide sequence portion and a sequence selected from the group consisting of SEQ ID NOs: 864-877.

[0193] In some embodiments, the CRISPR nuclease comprises a sequence having at least 90% identity to the amino acid sequence set forth in SEQ ID NO: 53, and at least one RNA molecule comprises a sequence selected from the group consisting of SEQ ID NOs: 878-891.

[0194] In some embodiments, the CRISPR nuclease comprises a sequence having at least 90% identity to the amino acid sequence set forth in SEQ ID NO: 53 and at least one RNA molecule is a CRISPR RNA (crRNA) molecule comprising a guide sequence portion and a sequence selected from the group consisting of SEQ ID NOs: 878-881.

[0195] In some embodiments, the composition further comprising a transactivating CRISPR RNA (tracrRNA) molecule comprising a sequence set forth in the group consisting of SEQ ID NOs: 882-890.

[0196] In some embodiments, the CRISPR nuclease comprises a sequence having at least 90% identity to the amino acid sequence set forth in SEQ ID NO: 53 and at least one RNA molecule is a single-guide RNA (sgRNA) molecule comprising a guide sequence portion and a sequence selected from the group consisting of SEQ ID NOs: 878-891.

[0197] In some embodiments, the CRISPR nuclease comprises a sequence having at least 90% identity to the amino acid sequence set forth in SEQ ID NO: 54, and at least one RNA molecule comprises a sequence selected from the group consisting of SEQ ID NOs: 892-906.

[0198] In some embodiments, the CRISPR nuclease comprises a sequence having at least 90% identity to the amino acid sequence set forth in SEQ ID NO: 54 and at least one RNA molecule is a CRISPR RNA (crRNA) molecule comprising a guide sequence portion and a sequence selected from the group consisting of SEQ ID NOs: 892-895.

[0199] In some embodiments, the composition further comprises a transactivating CRISPR RNA (tracrRNA) molecule comprising a sequence set forth in the group consisting of SEQ ID NOs: 896-903 and 906.

[0200] In some embodiments, the CRISPR nuclease comprises a sequence having at least 90% identity to the amino acid sequence set forth in SEQ ID NO: 54 and at least one RNA molecule is a single-guide RNA (sgRNA) molecule comprising a guide sequence portion and a sequence selected from the group consisting of SEQ ID NOs: 892-906.

[0201] In some embodiments, the CRISPR nuclease comprises a sequence having at least 90% identity to the amino acid sequence set forth in SEQ ID NO: 55, and at least one RNA molecule comprises a sequence selected from the group consisting of SEQ ID NOs: 907-920.

[0202] In some embodiments, the CRISPR nuclease comprises a sequence having at least 90% identity to the amino acid sequence set forth in SEQ ID NO: 55 and at least one RNA molecule is a CRISPR RNA (crRNA) molecule comprising a guide sequence portion and a sequence selected from the group consisting of SEQ ID NOs: 907-910.

[0203] In some embodiments, the composition further comprises a transactivating CRISPR RNA (tracrRNA) molecule comprising a sequence set forth in the group consisting of SEQ ID NOs: 911-919.

[0204] In some embodiments, the CRISPR nuclease comprises a sequence having at least 90% identity to the amino acid sequence set forth in SEQ ID NO: 55 and at least one RNA molecule is a single-guide RNA (sgRNA) molecule comprising a guide sequence portion and a sequence selected from the group consisting of SEQ ID NOs: 907-920.

[0205] In some embodiments, the CRISPR nuclease comprises a sequence having at least 90% identity to the amino acid sequence set forth in SEQ ID NO: 56, and at least one RNA molecule comprises a sequence selected from the group consisting of SEQ ID NOs: 921-933.

[0206] In some embodiments, the CRISPR nuclease comprises a sequence having at least 90% identity to the amino acid sequence set forth in SEQ ID NO: 56 and at least one RNA molecule is a CRISPR RNA (crRNA) molecule comprising a guide sequence portion and a sequence selected from the group consisting of SEQ ID NOs: 921-924.

[0207] In some embodiments, the composition further comprises a transactivating CRISPR RNA (tracrRNA) molecule comprising a sequence set forth in the group consisting of SEQ ID NOs: 925-932.

[0208] In some embodiments, the CRISPR nuclease comprises a sequence having at least 90% identity to the amino acid sequence set forth in SEQ ID NO: 56 and at least one RNA molecule is a single-guide RNA (sgRNA) molecule comprising a guide sequence portion and a sequence selected from the group consisting of SEQ ID NOs: 921-933.

[0209] In some embodiments, the CRISPR nuclease comprises a sequence having at least 90% identity to the amino acid sequence set forth in SEQ ID NO: 57, and at least one RNA molecule comprises a sequence selected from the group consisting of SEQ ID NOs: 934-947.

[0210] In some embodiments, the CRISPR nuclease comprises a sequence having at least 90% identity to the amino acid sequence set forth in SEQ ID NO: 57 and at least one RNA molecule is a CRISPR RNA (crRNA) molecule comprising a guide sequence portion and a sequence selected from the group consisting of SEQ ID NOs: 934-937.

[0211] In some embodiments, the composition further comprises a transactivating CRISPR RNA (tracrRNA) molecule comprising a sequence set forth in the group consisting of SEQ ID NOs: 938-946.

[0212] In some embodiments, the CRISPR nuclease comprises a sequence having at least 90% identity to the amino acid sequence set forth in SEQ ID NO: 57 and at least one RNA molecule is a single-guide RNA (sgRNA) molecule comprising a guide sequence portion and a sequence selected from the group consisting of SEQ ID NOs: 934-947.

[0213] In some embodiments, the CRISPR nuclease comprises a sequence having at least 90% identity to the amino acid sequence set forth in SEQ ID NO: 58, and at least one RNA molecule comprises a sequence selected from the group consisting of SEQ ID NOs: 948-963.

[0214] In some embodiments, the CRISPR nuclease comprises a sequence having at least 90% identity to the amino acid sequence set forth in SEQ ID NO: 58 and at least one RNA molecule is a CRISPR RNA (crRNA) molecule comprising a guide sequence portion and a sequence selected from the group consisting of SEQ ID NOs: 948-951.

[0215] In some embodiments, the composition further comprises a transactivating CRISPR RNA (tracrRNA) molecule comprising a sequence set forth in the group consisting of SEQ ID NOs: 952-960 and 963.

[0216] In some embodiments, the CRISPR nuclease comprises a sequence having at least 90% identity to the amino acid sequence set forth in SEQ ID NO: 58 and at least one RNA molecule is a single-guide RNA (sgRNA) molecule comprising a guide sequence portion and a sequence selected from the group consisting of SEQ ID NOs: 948-963.

[0217] In some embodiments, the CRISPR nuclease comprises a sequence having at least 90% identity to the amino acid sequence set forth in SEQ ID NO: 59, and at least one RNA molecule comprises a sequence selected from the group consisting of SEQ ID NOs: 964-977.

[0218] In some embodiments, the CRISPR nuclease comprises a sequence having at least 90% identity to the amino acid sequence set forth in SEQ ID NO: 59 and at least one RNA molecule is a CRISPR RNA (crRNA) molecule comprising a guide sequence portion and a sequence selected from the group consisting of SEQ ID NOs: 964-967.

[0219] In some embodiments, the composition further comprises a transactivating CRISPR RNA (tracrRNA) molecule comprising a sequence set forth in the group consisting of SEQ ID NOs: 968-976.

[0220] In some embodiments, the CRISPR nuclease comprises a sequence having at least 90% identity to the amino acid sequence set forth in SEQ ID NO: 59 and at least one RNA molecule is a single-guide RNA (sgRNA) molecule comprising a guide sequence portion and a sequence selected from the group consisting of SEQ ID NOs: 964-977.

[0221] In some embodiments, the CRISPR nuclease comprises a sequence having at least 90% identity to the amino acid sequence set forth in SEQ ID NO: 60, and at least one RNA molecule comprises a sequence selected from the group consisting of SEQ ID NOs: 978-993.

[0222] In some embodiments, the CRISPR nuclease comprises a sequence having at least 90% identity to the amino acid sequence set forth in SEQ ID NO: 60 and at least one RNA molecule is a CRISPR RNA (crRNA) molecule comprising a guide sequence portion and a sequence selected from the group consisting of SEQ ID NOs: 978-981.

[0223] In some embodiments, the composition further comprises a transactivating CRISPR RNA (tracrRNA) molecule comprising a sequence set forth in the group consisting of SEQ ID NOs: 982-990 and 993.

[0224] In some embodiments, the CRISPR nuclease comprises a sequence having at least 90% identity to the amino acid sequence set forth in SEQ ID NO: 60 and at least one RNA molecule is a single-guide RNA (sgRNA) molecule comprising a guide sequence portion and a sequence selected from the group consisting of SEQ ID NOs: 978-993.

[0225] In some embodiments, the CRISPR nuclease comprises a sequence having at least 90% identity to the amino acid sequence set forth in SEQ ID NO: 61, and at least one RNA molecule comprises a sequence selected from the group consisting of SEQ ID NOs: 994-1009.

[0226] In some embodiments, the CRISPR nuclease comprises a sequence having at least 90% identity to the amino acid sequence set forth in SEQ ID NO: 61 and at least one RNA molecule is a CRISPR RNA (crRNA) molecule comprising a guide sequence portion and a sequence selected from the group consisting of SEQ ID NOs: 994-997.

[0227] In some embodiments, the composition further comprises a transactivating CRISPR RNA (tracrRNA) molecule comprising a sequence set forth in the group consisting of SEQ ID NOs: 998-1006 and 1009.

[0228] In some embodiments, the CRISPR nuclease comprises a sequence having at least 90% identity to the amino acid sequence set forth in SEQ ID NO: 61 and at least one RNA molecule is a single-guide RNA (sgRNA) molecule comprising a guide sequence portion and a sequence selected from the group consisting of SEQ ID NOs: 994-1009.

[0229] In some embodiments, the CRISPR nuclease comprises a sequence having at least 90% identity to the amino acid sequence set forth in SEQ ID NO: 62, and at least one RNA molecule comprises a sequence selected from the group consisting of SEQ ID NOs: 1010-1023.

[0230] In some embodiments, the CRISPR nuclease comprises a sequence having at least 90% identity to the amino acid sequence set forth in SEQ ID NO: 62 and at least one RNA molecule is a CRISPR RNA (crRNA) molecule comprising a guide sequence portion and a sequence selected from the group consisting of SEQ ID NOs: 1010-1013.

[0231] In some embodiments, the composition further comprises a transactivating CRISPR RNA (tracrRNA) molecule comprising a sequence set forth in the group consisting of SEQ ID NOs: 1014-1022.

[0232] In some embodiments, the CRISPR nuclease comprises a sequence having at least 90% identity to the amino acid sequence set forth in SEQ ID NO: 62 and at least one RNA molecule is a single-guide RNA (sgRNA) molecule comprising a guide sequence portion and a sequence selected from the group consisting of SEQ ID NOs: 1010-1023.

[0233] In some embodiments, the CRISPR nuclease comprises a sequence having at least 90% identity to the amino acid sequence set forth in SEQ ID NO: 63 or SEQ ID NO: 64, and at least one RNA molecule comprises a sequence selected from the group consisting of SEQ ID NOs: 1024-1051.

[0234] In some embodiments, the CRISPR nuclease comprises a sequence having at least 90% identity to the amino acid sequence set forth in SEQ ID NO: 63 or SEQ ID NO: 64 and at least one RNA molecule is a CRISPR RNA (crRNA) molecule comprising a guide sequence portion and a sequence selected from the group consisting of SEQ ID NOs: 1024-1027 and 1038-1041.

[0235] In some embodiments, the composition further comprises a transactivating CRISPR RNA (tracrRNA) molecule comprising a sequence set forth in the group consisting of SEQ ID NOs: 1028-1036 and 1042-1050.

[0236] In some embodiments, the CRISPR nuclease comprises a sequence having at least 90% identity to the amino acid sequence set forth in SEQ ID NO: 63 or SEQ ID NO: 64 and at least one RNA molecule is a single-guide RNA (sgRNA) molecule comprising a guide sequence portion and a sequence selected from the group consisting of SEQ ID NOs: 1024-1051.

[0237] In some embodiments, the CRISPR nuclease comprises a sequence having at least 90% identity to the amino acid sequence set forth in SEQ ID NO: 65, and at least one RNA molecule comprises a sequence selected from the group consisting of SEQ ID NOs: 1052-1067.

[0238] In some embodiments, the CRISPR nuclease comprises a sequence having at least 90% identity to the amino acid sequence set forth in SEQ ID NO: 65 and at least one RNA molecule is a CRISPR RNA (crRNA) molecule comprising a guide sequence portion and a sequence selected from the group consisting of SEQ ID NOs: 1052-1055.

[0239] In some embodiments, the composition further comprises a transactivating CRISPR RNA (tracrRNA) molecule comprising a sequence set forth in the group consisting of SEQ ID NOs: 1056-1063, 1066, and 1067.

[0240] In some embodiments, the CRISPR nuclease comprises a sequence having at least 90% identity to the amino acid sequence set forth in SEQ ID NO: 65 and at least one RNA molecule is a single-guide RNA (sgRNA) molecule comprising a guide sequence portion and a sequence selected from the group consisting of SEQ ID NOs: 1052-1067.

[0241] In some embodiments, the CRISPR nuclease comprises a sequence having at least 90% identity to the amino acid sequence set forth in SEQ ID NO: 66, and at least one RNA molecule comprises a sequence selected from the group consisting of SEQ ID NOs: 1068-1081.

[0242] In some embodiments, the CRISPR nuclease comprises a sequence having at least 90% identity to the amino acid sequence set forth in SEQ ID NO: 66 and at least one RNA molecule is a CRISPR RNA (crRNA) molecule comprising a guide sequence portion and a sequence selected from the group consisting of SEQ ID NOs: 1068-1071.

[0243] In some embodiments, the composition further comprises a transactivating CRISPR RNA (tracrRNA) molecule comprising a sequence set forth in the group consisting of SEQ ID NOs: 1072-1078 and 1081.

[0244] In some embodiments, the CRISPR nuclease comprises a sequence having at least 90% identity to the amino acid sequence set forth in SEQ ID NO: 66 and at least one RNA molecule is a single-guide RNA (sgRNA) molecule comprising a guide sequence portion and a sequence selected from the group consisting of SEQ ID NOs: 1068-1081.

[0245] In some embodiments, the CRISPR nuclease comprises a sequence having at least 90% identity to the amino acid sequence set forth in SEQ ID NO: 67, and at least one RNA molecule comprises a sequence selected from the group consisting of SEQ ID NOs: 1082-1095.

[0246] In some embodiments, the CRISPR nuclease comprises a sequence having at least 90% identity to the amino acid sequence set forth in SEQ ID NO: 67 and at least one RNA molecule is a CRISPR RNA (crRNA) molecule comprising a guide sequence portion and a sequence selected from the group consisting of SEQ ID NOs: 1082-1085.

[0247] In some embodiments, the composition further comprises a transactivating CRISPR RNA (tracrRNA) molecule comprising a sequence set forth in the group consisting of SEQ ID NOs: 1086-1094.

[0248] In some embodiments, the CRISPR nuclease comprises a sequence having at least 90% identity to the amino acid sequence set forth in SEQ ID NO: 67 and at least one RNA molecule is a single-guide RNA (sgRNA) molecule comprising a guide sequence portion and a sequence selected from the group consisting of SEQ ID NOs: 1082-1095.

[0249] In some embodiments, the CRISPR nuclease comprises a sequence having at least 90% identity to the amino acid sequence set forth in SEQ ID NO: 68, and at least one RNA molecule comprises a sequence selected from the group consisting of SEQ ID NOs: 1096-1111.

[0250] In some embodiments, the CRISPR nuclease comprises a sequence having at least 90% identity to the amino acid sequence set forth in SEQ ID NO: 68 and at least one RNA molecule is a CRISPR RNA (crRNA) molecule comprising a guide sequence portion and a sequence selected from the group consisting of SEQ ID NOs: 1096-1099.

[0251] In some embodiments, the composition further comprises a transactivating CRISPR RNA (tracrRNA) molecule comprising a sequence set forth in the group consisting of SEQ ID NOs: 1100-1108 and 1111.

[0252] In some embodiments, the CRISPR nuclease comprises a sequence having at least 90% identity to the amino acid sequence set forth in SEQ ID NO: 68 and at least one RNA molecule is a single-guide RNA (sgRNA) molecule comprising a guide sequence portion and a sequence selected from the group consisting of SEQ ID NOs: 1096-1111.

[0253] In some embodiments, the CRISPR nuclease comprises a sequence having at least 90% identity to the amino acid sequence set forth in SEQ ID NO: 69, and at least one RNA molecule comprises a sequence selected from the group consisting of SEQ ID NOs: 1112-1125.

[0254] In some embodiments, the CRISPR nuclease comprises a sequence having at least 90% identity to the amino acid sequence set forth in SEQ ID NO: 69 and at least one RNA molecule is a CRISPR RNA (crRNA) molecule comprising a guide sequence portion and a sequence selected from the group consisting of SEQ ID NOs: 1112-1115.

[0255] In some embodiments, the composition further comprises a transactivating CRISPR RNA (tracrRNA) molecule comprising a sequence set forth in the group consisting of SEQ ID NOs: 1116-1124.

[0256] In some embodiments, the CRISPR nuclease comprises a sequence having at least 90% identity to the amino acid sequence set forth in SEQ ID NO: 69 and at least one RNA molecule is a single-guide RNA (sgRNA) molecule comprising a guide sequence portion and a sequence selected from the group consisting of SEQ ID NOs: 1112-1125.

[0257] In some embodiments, the CRISPR nuclease comprises a sequence having at least 90% identity to the amino acid sequence set forth in SEQ ID NO: 70, SEQ ID NO: 71, SEQ ID NO: 72, or SEQ ID NO: 73 and at least one RNA molecule comprises a sequence selected from the group consisting of SEQ ID NOs: 1126-1138.

[0258] In some embodiments, the CRISPR nuclease comprises a sequence having at least 90% identity to the amino acid sequence set forth in SEQ ID NO: 70, SEQ ID NO: 71, SEQ ID NO: 72, or SEQ ID NO: 73 and at least one RNA molecule is a CRISPR RNA (crRNA) molecule comprising a guide sequence portion and a sequence selected from the group consisting of SEQ ID NOs: 1126-1129.

[0259] In some embodiments, the composition further comprises a transactivating CRISPR RNA (tracrRNA) molecule comprising a sequence set forth in the group consisting of SEQ ID NOs: 1130-1137.

[0260] In some embodiments, the CRISPR nuclease comprises a sequence having at least 90% identity to the amino acid sequence set forth in SEQ ID NO: 70, SEQ ID NO: 71, SEQ ID NO: 72, or SEQ ID NO: 73 and at least one RNA molecule is a single-guide RNA (sgRNA) molecule comprising a guide sequence portion and a sequence selected from the group consisting of SEQ ID NOs: 1126-1138.

[0261] In some embodiments, the CRISPR nuclease comprises a sequence having at least 90% identity to the amino acid sequence set forth in SEQ ID NO: 74, and at least one RNA molecule comprises a sequence selected from the group consisting of SEQ ID NOs: 1139-1150.

[0262] In some embodiments, the CRISPR nuclease comprises a sequence having at least 90% identity to the amino acid sequence set forth in SEQ ID NO: 74 and at least one RNA molecule is a CRISPR RNA (crRNA) molecule comprising a guide sequence portion and a sequence selected from the group consisting of SEQ ID NOs: 1139-1142.

[0263] In some embodiments, the composition further comprises a transactivating CRISPR RNA (tracrRNA) molecule comprising a sequence set forth in the group consisting of SEQ ID NOs: 1143-1149.

[0264] In some embodiments, the CRISPR nuclease comprises a sequence having at least 90% identity to the amino acid sequence set forth in SEQ ID NO: 74 and at least one RNA molecule is a single-guide RNA (sgRNA) molecule comprising a guide sequence portion and a sequence selected from the group consisting of SEQ ID NOs: 1139-1150.

[0265] In some embodiments, the CRISPR nuclease comprises a sequence having at least 90% identity to the amino acid sequence set forth in SEQ ID NO: 75, and at least one RNA molecule comprises a sequence selected from the group consisting of SEQ ID NOs: 1151-1166.

[0266] In some embodiments, the CRISPR nuclease comprises a sequence having at least 90% identity to the amino acid sequence set forth in SEQ ID NO: 75 and at least one RNA molecule is a CRISPR RNA (crRNA) molecule comprising a guide sequence portion and a sequence selected from the group consisting of SEQ ID NOs: 1151-1154.

[0267] In some embodiments, the composition further comprises a transactivating CRISPR RNA (tracrRNA) molecule comprising a sequence set forth in the group consisting of SEQ ID NOs: 1155-1163 and 1166.

[0268] In some embodiments, the CRISPR nuclease comprises a sequence having at least 90% identity to the amino acid sequence set forth in SEQ ID NO: 75 and at least one RNA molecule is a single-guide RNA (sgRNA) molecule comprising a guide sequence portion and a sequence selected from the group consisting of SEQ ID NOs: 1151-1166.

[0269] In some embodiments, the CRISPR nuclease comprises a sequence having at least 90% identity to the amino acid sequence set forth in SEQ ID NO: 76, and at least one RNA molecule comprises a sequence selected from the group consisting of SEQ ID NOs: 1167-1178.

[0270] In some embodiments, the CRISPR nuclease comprises a sequence having at least 90% identity to the amino acid sequence set forth in SEQ ID NO: 76 and at least one RNA molecule is a CRISPR RNA (crRNA) molecule comprising a guide sequence portion and a sequence selected from the group consisting of SEQ ID NOs: 1167-1170.

[0271] In some embodiments, the composition further comprises a transactivating CRISPR RNA (tracrRNA) molecule comprising a sequence set forth in the group consisting of SEQ ID NOs: 1171-1177.

[0272] In some embodiments, the CRISPR nuclease comprises a sequence having at least 90% identity to the amino acid sequence set forth in SEQ ID NO: 76 and at least one RNA molecule is a single-guide RNA (sgRNA) molecule comprising a guide sequence portion and a sequence selected from the group consisting of SEQ ID NOs: 1167-1178.

[0273] In some embodiments, the CRISPR nuclease comprises a sequence having at least 90% identity to the amino acid sequence set forth in SEQ ID NO: 77 or SEQ ID NO: 78, and at least one RNA molecule comprises a sequence selected from the group consisting of SEQ ID NOs: 1179-1202.

[0274] In some embodiments, the CRISPR nuclease comprises a sequence having at least 90% identity to the amino acid sequence set forth in SEQ ID NO: 77 or SEQ ID NO: 78 and at least one RNA molecule is a CRISPR RNA (crRNA) molecule comprising a guide sequence portion and a sequence selected from the group consisting of SEQ ID NOs: 1179-1182 and 1191-1194.

[0275] In some embodiments, the composition further comprises a transactivating CRISPR RNA (tracrRNA) molecule comprising a sequence set forth in the group consisting of SEQ ID NOs: 1183-1189 and 1195-1201.

[0276] In some embodiments, the CRISPR nuclease comprises a sequence having at least 90% identity to the amino acid sequence set forth SEQ ID NO: 77 or SEQ ID NO: 78 and at least one RNA molecule is a single-guide RNA (sgRNA) molecule comprising a guide sequence portion and a sequence selected from the group consisting of SEQ ID NOs: 1179-1202.

[0277] In some embodiments, the CRISPR nuclease comprises a sequence having at least 90% identity to the amino acid sequence set forth in SEQ ID NO: 79, and at least one RNA molecule comprises a sequence selected from the group consisting of SEQ ID NOs: 1203-1215.

[0278] In some embodiments, the CRISPR nuclease comprises a sequence having at least 90% identity to the amino acid sequence set forth in SEQ ID NO: 79 and at least one RNA molecule is a CRISPR RNA (crRNA) molecule comprising a guide sequence portion and a sequence selected from the group consisting of SEQ ID NOs: 1203-1206.

[0279] In some embodiments, the composition further comprises a transactivating CRISPR RNA (tracrRNA) molecule comprising a sequence set forth in the group consisting of SEQ ID NOs: 1207-1214.

[0280] In some embodiments, the CRISPR nuclease comprises a sequence having at least 90% identity to the amino acid sequence set forth in SEQ ID NO: 79 and at least one RNA molecule is a single-guide RNA (sgRNA) molecule comprising a guide sequence portion and a sequence selected from the group consisting of SEQ ID NOs: 1203-1215.

[0281] In some embodiments, the CRISPR nuclease comprises a sequence having at least 90% identity to the amino acid sequence set forth in SEQ ID NO: 80, and at least one RNA molecule comprises a sequence selected from the group consisting of SEQ ID NOs: 1216-1227.

[0282] In some embodiments, the CRISPR nuclease comprises a sequence having at least 90% identity to the amino acid sequence set forth in SEQ ID NO: 80 and at least one RNA molecule is a CRISPR RNA (crRNA) molecule comprising a guide sequence portion and a sequence selected from the group consisting of SEQ ID NOs: 1216-1219.

[0283] In some embodiments, the composition further comprises a transactivating CRISPR RNA (tracrRNA) molecule comprising a sequence set forth in the group consisting of SEQ ID NOs: 1220-1226.

[0284] In some embodiments, the CRISPR nuclease comprises a sequence having at least 90% identity to the amino acid sequence set forth in SEQ ID NO: 80 and at least one RNA molecule is a single-guide RNA (sgRNA) molecule comprising a guide sequence portion and a sequence selected from the group consisting of SEQ ID NOs: 1216-1227.

[0285] In some embodiments, the CRISPR nuclease comprises a sequence having at least 90% identity to the amino acid sequence set forth in SEQ ID NO: 81, and at least one RNA molecule comprises a sequence selected from the group consisting of SEQ ID NOs: 1228-1240.

[0286] In some embodiments, the CRISPR nuclease comprises a sequence having at least 90% identity to the amino acid sequence set forth in SEQ ID NO: 81 and at least one RNA molecule is a CRISPR RNA (crRNA) molecule comprising a guide sequence portion and a sequence selected from the group consisting of SEQ ID NOs: 1228-1231.

[0287] In some embodiments, the composition further comprises a transactivating CRISPR RNA (tracrRNA) molecule comprising a sequence set forth in the group consisting of SEQ ID NOs: 1232-1239.

[0288] In some embodiments, the CRISPR nuclease comprises a sequence having at least 90% identity to the amino acid sequence set forth in SEQ ID NO: 81 and at least one RNA molecule is a single-guide RNA (sgRNA) molecule comprising a guide sequence portion and a sequence selected from the group consisting of SEQ ID NOs: 1228-1240.

[0289] In some embodiments, the CRISPR nuclease comprises a sequence having at least 90% identity to the amino acid sequence set forth in SEQ ID NO: 82 or SEQ ID NO: 83, and at least one RNA molecule comprises a sequence selected from the group consisting of SEQ ID NOs: 1241-1252 and GCUUUAAGC.

[0290] In some embodiments, the CRISPR nuclease comprises a sequence having at least 90% identity to the amino acid sequence set forth in SEQ ID NO: 82 or SEQ ID NO: 83 and at least one RNA molecule is a CRISPR RNA (crRNA) molecule comprising a guide sequence portion and a sequence selected from the group consisting of SEQ ID NOs: 1241-1244.

[0291] In some embodiments, the composition further comprises a transactivating CRISPR RNA (tracrRNA) molecule comprising a sequence set forth in the group consisting of SEQ ID NOs: 1245-1251 and GCUUUAAGC.

[0292] In some embodiments, the CRISPR nuclease comprises a sequence having at least 90% identity to the amino acid sequence set forth in SEQ ID NO: 82 or SEQ ID NO: 83 and at least one RNA molecule is a single-guide RNA (sgRNA) molecule comprising a guide sequence portion and a sequence selected from the group consisting of SEQ ID NOs: 1241-1252 and GCUUUAAGC.

[0293] In some embodiments, the CRISPR nuclease comprises a sequence having at least 90% identity to the amino acid sequence set forth in SEQ ID NO: 84, and at least one RNA molecule comprises a sequence selected from the group consisting of SEQ ID NOs: 1253-1265.

[0294] In some embodiments, the CRISPR nuclease comprises a sequence having at least 90% identity to the amino acid sequence set forth in SEQ ID NO: 84 and at least one RNA molecule is a CRISPR RNA (crRNA) molecule comprising a guide sequence portion and a sequence selected from the group consisting of SEQ ID NOs: 1253-1256.

[0295] In some embodiments, the composition further comprises a transactivating CRISPR RNA (tracrRNA) molecule comprising a sequence set forth in the group consisting of SEQ ID NOs: 1257-1264.

[0296] In some embodiments, the CRISPR nuclease comprises a sequence having at least 90% identity to the amino acid sequence set forth in SEQ ID NO: 84 and at least one RNA molecule is a single-guide RNA (sgRNA) molecule comprising a guide sequence portion and a sequence selected from the group consisting of SEQ ID NOs: 1253-1265.

[0297] In some embodiments, the CRISPR nuclease comprises a sequence having at least 90% identity to the amino acid sequence set forth in SEQ ID NO: 85, and at least one RNA molecule comprises a sequence selected from the group consisting of SEQ ID NOs: 1266-1280.

[0298] In some embodiments, the CRISPR nuclease comprises a sequence having at least 90% identity to the amino acid sequence set forth in SEQ ID NO: 85 and at least one RNA molecule is a CRISPR RNA (crRNA) molecule comprising a guide sequence portion and a sequence selected from the group consisting of SEQ ID NOs: 1266-1269 and 1279.

[0299] In some embodiments, the composition further comprises a transactivating CRISPR RNA (tracrRNA) molecule comprising a sequence set forth in the group consisting of SEQ ID NOs: 1270-1276 and 1280.

[0300] In some embodiments, the CRISPR nuclease comprises a sequence having at least 90% identity to the amino acid sequence set forth in SEQ ID NO: 85 and at least one RNA molecule is a single-guide RNA (sgRNA) molecule comprising a guide sequence portion and a sequence selected from the group consisting of SEQ ID NOs: 1266-1280.

[0301] In some embodiments, the CRISPR nuclease comprises a sequence having at least 90% identity to the amino acid sequence set forth in SEQ ID NO: 86, and at least one RNA molecule comprises a sequence selected from the group consisting of SEQ ID NOs: 1281-1298.

[0302] In some embodiments, the CRISPR nuclease comprises a sequence having at least 90% identity to the amino acid sequence set forth in SEQ ID NO: 86 and at least one RNA molecule is a CRISPR RNA (crRNA) molecule comprising a guide sequence portion and a sequence selected from the group consisting of SEQ ID NOs: 1281-1284 and 1296.

[0303] In some embodiments, the composition further comprises a transactivating CRISPR RNA (tracrRNA) molecule comprising a sequence set forth in the group consisting of SEQ ID NOs: 1285-1293, 1297, and 1298.

[0304] In some embodiments, the CRISPR nuclease comprises a sequence having at least 90% identity to the amino acid sequence set forth in SEQ ID NO: 86 and at least one RNA molecule is a single-guide RNA (sgRNA) molecule comprising a guide sequence portion and a sequence selected from the group consisting of SEQ ID NOs: 1281-1298.

[0305] In some embodiments, the CRISPR nuclease comprises a sequence having at least 90% identity to the amino acid sequence set forth in SEQ ID NO: 87, and at least one RNA molecule comprises a sequence selected from the group consisting of SEQ ID NOs: 1299-1314.

[0306] In some embodiments, the CRISPR nuclease comprises a sequence having at least 90% identity to the amino acid sequence set forth in SEQ ID NO: 87 and at least one RNA molecule is a CRISPR RNA (crRNA) molecule comprising a guide sequence portion and a sequence selected from the group consisting of SEQ ID NOs: 1299-1302 and 1314.

[0307] In some embodiments, the composition further comprises a transactivating CRISPR RNA (tracrRNA) molecule comprising a sequence set forth in the group consisting of SEQ ID NOs: 1303-1311.

[0308] In some embodiments, the CRISPR nuclease comprises a sequence having at least 90% identity to the amino acid sequence set forth in SEQ ID NO: 87 and at least one RNA molecule is a single-guide RNA (sgRNA) molecule comprising a guide sequence portion and a sequence selected from the group consisting of SEQ ID NOs: 1299-1314.

[0309] In some embodiments, the CRISPR nuclease comprises a sequence having at least 90% identity to the amino acid sequence set forth in SEQ ID NO: 88, and at least one RNA molecule comprises a sequence selected from the group consisting of SEQ ID NOs: 1315-1329.

[0310] In some embodiments, the CRISPR nuclease comprises a sequence having at least 90% identity to the amino acid sequence set forth in SEQ ID NO: 88 and at least one RNA molecule is a CRISPR RNA (crRNA) molecule comprising a guide sequence portion and a sequence selected from the group consisting of SEQ ID NOs: 1315-1318 and 1329.

[0311] In some embodiments, the composition further comprises a transactivating CRISPR RNA (tracrRNA) molecule comprising a sequence set forth in the group consisting of SEQ ID NOs: 1319-1326.

[0312] In some embodiments, the CRISPR nuclease comprises a sequence having at least 90% identity to the amino acid sequence set forth in SEQ ID NO: 88 and at least one RNA molecule is a single-guide RNA (sgRNA) molecule comprising a guide sequence portion and a sequence selected from the group consisting of SEQ ID NOs: 1315-1329.

[0313] In some embodiments, the CRISPR nuclease is a nickase having an inactivated RuvC domain created by an amino acid substitution at a position provided for the CRISPR nuclease in column 5 of Table 1.

[0314] In some embodiments, the CRISPR nuclease is a nickase having an inactivated HNH domain created by an amino acid substitution at a position provided for the CRISPR nuclease in column 6 of Table 1.

[0315] In some embodiments, the CRISPR nuclease is a catalytically dead nuclease having an inactivated RuvC domain and an inactivated HNH domain created by substitutions at the positions provided for the CRISPR nuclease in column 7 of Table 1.

[0316] For example, a nickase may be generated for the OMNI-140 nuclease by inactivating its RuvC domain by substituting an aspartic acid residue (D) in position 11 of the amino acid sequence of OMNI-140 (SEQ ID NO: 2) for another amino acid e.g. alanine (A). Substitution to any other amino acid is permissible for each of the amino acid positions indicated in columns 5-7 of Table 1, except if the amino acid position is followed by an asterisk, which indicates that any substitution other than aspartic acid (D) to glutamic acid (E) or glutamic acid (E) or aspartic acid (D) results in inactivation. For example, a nickase may be generated for the OMNI-140 nuclease by inactivating its HNH domain by substituting an aspartic acid residue (D) in position 575 of the amino acid sequence of OMNI-140 (SEQ ID NO: 2) for an amino acid other than glutamic acid (E), e.g. for alanine (A). Other nickases or catalytically dead nucleases can be generated using the same notation in Table 1.

[0317] In some embodiments, the CRISPR nuclease utilizes a protospacer adjacent motif (PAM) sequence provided for the CRISPR nuclease in columns 2-4 of Table 3.

[0318] In some embodiments, the CRISPR nuclease has an amino acid sequence having at least 95% sequence identity to SEQ ID NO: 68 and effects a DNA break in a DNA strand adjacent to a NNNRCNNN, NRVRCNNN, or NVNRCNNN protospacer adjacent motif (PAM) sequence, and/or effects a DNA break in a DNA strand adjacent to a sequence that is complementary to the PAM sequence

[0319] According to some aspects of the invention, the disclosed method provide a method of modifying a nucleotide sequence at a DNA target site in a cell-free system or the genome of a cell comprising introducing into the cell any one of the compositions described above. In some embodiments, the composition comprises a CRISPR nuclease and a crRNA: tracrRNA complex or a sgRNA molecule.

[0320] In some embodiments, the CRISPR nuclease effects a DNA break in a DNA strand adjacent to a protospacer adjacent motif (PAM) sequence provided for the CRISPR nuclease in columns 2-4 of Table 3, and effects a DNA break in a DNA strand adjacent to a sequence that is complementary to the PAM sequence. For example, the OMNI-140 nuclease with the appropriate targeting sgRNA or crRNA: tracrRNA complex is capable of forming a DNA break in strand adjacent to a NNRNYMYN, NNRRCMYN, or NNRDCMYN sequence and in a DNA strand adjacent to a sequence that is complementary to a NNRNYMYN, NNRRCMYN, or NNRDCMYN sequence. In some embodiments, the DNA strand is within a nucleus of a cell.

[0321] In some embodiments, the CRISPR nuclease is a nickase having an inactivated RuvC domain created by an amino acid substitution at a position provided for the CRISPR nuclease in column 5 of Table 1, and effects a DNA break in a DNA strand adjacent to a sequence that is complementary to the PAM sequence.

[0322] In some embodiments, the CRISPR nuclease is a catalytically dead nuclease having an inactivated RuvC domain and an inactivated HNH domain created by substitutions at the positions provided for the CRISPR nuclease in column 7 of Table 1, and effects a DNA break in a DNA strand adjacent to the PAM sequence.

[0323] In some embodiments, the cell is a eukaryotic cell or a prokaryotic cell.

[0324] In some embodiments, the cell is a mammalian cell.

[0325] In some embodiments, the cell is a human cell.

[0326] In some embodiments, the CRISPR nuclease comprises an amino acid sequence having at least 100%, 99%, 98%, 97%, 96%, 95%, 94%, 93%, 92%, 91%, 90%, 89%, 88%, 87%, 86%, 85%, 84%, 83%, or 82% amino acid sequence identity to a CRISPR nuclease as set forth in any of SEQ ID NOs: 1-88. In an embodiment the sequence encoding the CRISPR nuclease has at least 95% identity to a nucleic acid sequence selected from the group consisting of SEQ ID NOs: 89-264.

[0327] According to some aspects of the invention, the disclosed compositions comprise DNA constructs or a vector system comprising nucleotide sequences that encode the CRISPR nuclease or variant CRISPR nuclease. In some embodiments, the nucleotide sequence that encode the CRISPR nuclease or variant CRISPR nuclease is operably linked to a promoter that is operable in the cells of interest. In some embodiments, the cell of interest is a eukaryotic cell. In some embodiments the cell of interest is a mammalian cell. In some embodiments, the nucleic acid sequence encoding the engineered CRISPR nuclease is codon optimized for use in cells from a particular organism. In some embodiments, the nucleic acid sequence encoding the nuclease is codon optimized for E. coli. In some embodiments, the nucleic acid sequence encoding the nuclease is codon optimized for eukaryotic cells. In some embodiments, the nucleic acid sequence encoding the nuclease is codon optimized for mammalian cells.

[0328] In some embodiments, the composition comprises a recombinant nucleic acid, comprising a heterologous promoter operably linked to a polynucleotide encoding a CRISPR enzyme having at least 100%, 99%, 98%, 97%, 96%, 95%, 94%, 93%, 92%, 91%, 90% identity to any of SEQ ID NOs: 1-88. Each possibility represents a separate embodiment.

[0329] According to some embodiments, there is provided an engineered or non-naturally occurring composition comprising a CRISPR nuclease comprising a sequence having at least 100%, 99%, 98%, 97%, 96%, 95%, 94%, 93%, 92%, 91%, 90%, 85%, or 80% identity to the amino acid sequence selected from the group consisting of SEQ ID NOs: 1-88 or a nucleic acid molecule comprising a sequence encoding the CRISPR nuclease. Each possibility represents a separate embodiment.

[0330] In an embodiment, the CRISPR nuclease is engineered or non-naturally occurring. The CRISPR nuclease may also be recombinant. Such CRISPR nucleases are produced using laboratory methods (molecular cloning) to bring together genetic material from multiple sources, creating sequences that would not otherwise be found in biological organisms.

[0331] In an embodiment, the CRISPR nuclease of the invention exhibits increased specificity to a target site compared to a SpCas9 nuclease when complexed with the one or more RNA molecules.

[0332] In an embodiment, the complex of the CRISPR nuclease of the invention and one or more RNA molecules exhibits at least maintained on-target editing activity of the target site and reduced off-target activity compared to SpCas9 nuclease.

[0333] In an embodiment, the CRISPR nuclease further comprises an RNA-binding portion capable of interacting with a DNA-targeting RNA molecule (e.g. a sgRNA molecule) and an activity portion that exhibits site-directed enzymatic activity.

[0334] In an embodiment, the composition further comprises a DNA-targeting RNA molecule or a DNA polynucleotide encoding a DNA-targeting RNA molecule, wherein the DNA-targeting RNA molecule comprises a guide sequence portion, i.e. a nucleotide sequence that is complementary to a sequence in a target region, wherein the DNA-targeting RNA molecule and the CRISPR nuclease do not naturally occur together.

[0335] In an embodiment, the DNA-targeting RNA molecule further comprises a nucleotide sequence that can form a complex with a CRISPR nuclease.

[0336] This invention also provides a non-naturally occurring composition comprising a CRISPR associated system comprising:
[0337] a) one or more RNA molecules comprising a guide sequence portion linked to a direct repeat sequence, wherein the guide sequence is capable of hybridizing with a target sequence, or one or more nucleotide sequences encoding the one or more RNA molecules; and
[0338] b) a CRISPR nuclease comprising an amino acid sequence having at least 95% identity to the amino acid sequence selected from the group consisting of SEQ ID NOs: 1-88 or a nucleic acid molecule comprising a sequence encoding the CRISPR nuclease;
   [0339] wherein the one or more RNA molecules hybridize to the target sequence, wherein the target sequence is adjacent to the 3′ end of a complimentary sequence of a Protospacer Adjacent Motif (PAM), and the one or more RNA molecules form a complex with the RNA-guided nuclease.

[0340] In an embodiment, the composition further comprises an RNA molecule comprising a nucleotide sequence that can form a complex with a CRISPR nuclease (e.g. a tracrRNA molecule) or a DNA polynucleotide comprising a sequence encoding an RNA molecule that can form a complex with the CRISPR nuclease.

[0341] In an embodiment, the composition further comprises a donor template for homology directed repair (HDR).

[0342] In an embodiment, the composition is capable of editing the target region in the genome of a cell.

[0343] According to some embodiments, there is provided a non-naturally occurring composition comprising:
[0344] (a) a CRISPR nuclease, or a polynucleotide encoding the CRISPR nuclease, comprising:
   [0345] an RNA-binding portion; and
   [0346] an activity portion that exhibits site-directed enzymatic activity, wherein the CRISPR nuclease has at least 100%, 99%, 98%, 97%, 96%, 95%, 94%, 93%, 92%, 91%, 90%, 85%, 80% identity to any of SEQ ID NOs: 1-88; and
[0347] (b) one or more RNA molecules or a DNA polynucleotide encoding the one or more RNA molecules comprising:
   [0348] i) a DNA-targeting RNA sequence, comprising a nucleotide sequence that is complementary to a sequence in a target DNA sequence; and
   [0349] ii) a protein-binding RNA sequence, capable of interacting with the RNA-binding portion of the CRISPR nuclease,
[0350] wherein the DNA targeting RNA sequence and the CRISPR nuclease do not naturally occur together. Each possibility represents a separate embodiment.

[0351] In some embodiments, there is provided a single RNA molecule comprising the DNA-targeting RNA sequence and the protein-binding RNA sequence, wherein the RNA molecule can form a complex with the CRISPR nuclease and serve as the DNA targeting module. In some embodiments, the RNA molecule has a length of up to 1000 bases, 900 bases, 800 bases, 700 bases, 600 bases, 500 bases, 400 bases, 300 bases, 200 bases, 100 bases, 50 bases. Each possibility represents a separate embodiment. In some embodiments, a first RNA molecule comprising the DNA-targeting RNA sequence and a second RNA molecule comprising the protein-binding RNA sequence interact by base pairing or alternatively fused together to form one or more RNA molecules that complex with the CRISPR nuclease and serve as the DNA targeting module.

[0352] This invention also provides a non-naturally occurring composition comprising:
[0353] a) a CRISPR nuclease comprising a sequence having at least 95% identity to the amino acid sequence selected from the group consisting of SEQ ID NOs: 1-88 or a nucleic acid molecule comprising a sequence encoding the CRISPR nuclease; and
[0354] b) one or more RNA molecules, or one or more DNA polynucleotide encoding the one or more RNA molecules, comprising at least one of:
   [0355] i) a nuclease-binding RNA nucleotide sequence capable of interacting with/binding to the CRISPR nuclease; and
   [0356] ii) a DNA-targeting RNA nucleotide sequence comprising a sequence complementary to a sequence in a target DNA sequence,
[0357] wherein the CRISPR nuclease is capable of complexing with the one or more RNA molecules to form a complex capable of hybridizing with the target DNA sequence.

[0358] In an embodiment, the CRISPR nuclease and the one or more RNA molecules form a CRISPR complex that is capable of binding to the target DNA sequence to effect cleavage of the target DNA sequence.

[0359] In an embodiment, the CRISPR nuclease and at least one of the one or more RNA molecules do not naturally occur together.

[0360] In an embodiment:
[0361] a) the CRISPR nuclease comprises an RNA-binding portion and an activity portion that exhibits site-directed enzymatic activity;
[0362] b) the DNA-targeting RNA nucleotide sequence comprises a nucleotide sequence that is complementary to a sequence in a target DNA sequence; and
[0363] c) the nuclease-binding RNA nucleotide sequence comprises a sequence that interacts with the RNA-binding portion of the CRISPR nuclease.

[0364] In an embodiment, the nuclease-binding RNA nucleotide sequence and the DNA-targeting RNA nucleotide sequence are on a single guide RNA molecule (sgRNA), wherein the sgRNA molecule can form a complex with the CRISPR nuclease and serve as the DNA targeting module.

[0365] In an embodiment, the nuclease-binding RNA nucleotide sequence is on a first RNA molecule and the DNA-targeting RNA nucleotide sequence is on a second RNA molecule, and wherein the first and second RNA molecules interact by base-pairing or are fused together to form a RNA complex or sgRNA that forms a complex with the CRISPR nuclease and serves as a DNA targeting module.

[0366] In an embodiment, the sgRNA has a length of up to 1000 bases, 900 bases, 800 bases, 700 bases, 600 bases, 500 bases, 400 bases, 300 bases, 200 bases, 100 bases, 50 bases.

[0367] In an embodiment, the composition further comprises a donor template for homology directed repair (HDR).

[0368] In an embodiment, the CRISPR nuclease comprises 1-10, 10-20, 20-30, 30-40, 40-50, 50-60, 60-70, 70-80, 80-90, 90-100, 100-110, 110-120, 120-130, 130-140, or 140-150 amino acid substitutions, deletions, and/or insertions compared to the amino acid sequence of the wild-type of the CRISPR nuclease.

[0369] In an embodiment, the CRISPR nuclease exhibits at least 2%, 5%, 7% 10%, 15%, 20%, 25%, 30%, or 35% increased specificity compared the wild-type of the CRISPR nuclease.

[0370] In an embodiment, the CRISPR nuclease exhibits at least 2%, 5%, 7% 10%, 15%, 20%, 25%, 30%, or 35% increased activity compared the wild-type of the CRISPR nuclease.

[0371] In an embodiment, the CRISPR nuclease has altered PAM specificity compared to the wild-type of the CRISPR nuclease.

[0372] In an embodiment, the CRISPR nuclease is non-naturally occurring.

[0373] In an embodiment, the CRISPR nuclease is engineered and comprises unnatural or synthetic amino acids.

[0374] In an embodiment, the CRISPR nuclease is engineered and comprises one or more of a nuclear localization sequences (NLS), cell penetrating peptide sequences, and/or affinity tags.

[0375] In an embodiment, the CRISPR nuclease comprises one or more nuclear localization sequences of sufficient strength to drive accumulation of a CRISPR complex comprising the CRISPR nuclease in a detectable amount in the nucleus of a eukaryotic cell.

[0376] This invention also provides a method of modifying a nucleotide sequence at a target site in a cell-free system or the genome of a cell comprising introducing into the cell any of the compositions of the invention.

[0377] In an embodiment, the cell is a eukaryotic cell.

[0378] In another embodiment, the cell is a prokaryotic cell.

[0379] In some embodiments, the one or more RNA molecules further comprises an RNA sequence comprising a nucleotide molecule that can form a complex with the RNA nuclease (tracrRNA) or a DNA polynucleotide encoding an RNA molecule comprising a nucleotide sequence that can form a complex with the CRISPR nuclease.

[0380] In an embodiment, the CRISPR nuclease comprises 1, 2, 3, 4, 5, 6, 7, 8, 9, 10, or more NLSs at or near the amino-terminus, 1, 2, 3, 4, 5, 6, 7, 8, 9, 10, or more NLSs at or near carboxy-terminus, or a combination of 1, 2, 3, 4, 5, 6, 7, 8, 9, 10, or more NLSs at or near the amino-terminus and 1, 2, 3, 4, 5, 6, 7, 8, 9, 10, or more NLSs at or near carboxy-terminus. In an embodiment 1-4 NLSs are fused with the CRISPR nuclease. In an embodiment, an NLS is located within the open-reading frame (ORF) of the CRISPR nuclease.

[0381] Methods of fusing an NLS at or near the amino-terminus, at or near carboxy-terminus, or within the ORF of an expressed protein are well known in the art. As an example, to fuse an NLS to the amino-terminus of a CRISPR nuclease, the nucleic acid sequence of the NLS is placed immediately after the start codon of the CRISPR nuclease on the nucleic acid encoding the NLS-fused CRISPR nuclease. Conversely, to fuse an NLS to the carboxy-terminus of a CRISPR nuclease the nucleic acid sequence of the NLS is placed after the codon encoding the last amino acid of the CRISPR nuclease and before the stop codon.

[0382] Any combination of NLSs, cell penetrating peptide sequences, and/or affinity tags at any position along the ORF of the CRISPR nuclease is contemplated in this invention.

[0383] The amino acid sequences and nucleic acid sequences of the CRISPR nucleases provided herein may include NLS and/or TAGs inserted so as to interrupt the contiguous amino acid or nucleic acid sequences of the CRISPR nucleases.

[0384] In an embodiment, the one or more NLSs are in tandem repeats.

[0385] In an embodiment, the one or more NLSs are considered in proximity to the N- or C-terminus when the nearest amino acid of the NLS is within about 1, 2, 3, 4, 5, 10, 15, 20, 25, 30, 40, 50, or more amino acids along the polypeptide chain from the N- or C-terminus.

[0386] As discussed, the CRISPR nuclease may be engineered to comprise one or more of a nuclear localization sequences (NLS), cell penetrating peptide sequences, and/or affinity tags.

[0387] In an embodiment, the CRISPR nuclease exhibits increased specificity to a target site compared to the wild-type of the CRISPR nuclease when complexed with the one or more RNA molecules.

[0388] In an embodiment, the complex of the CRISPR nuclease and one or more RNA molecules exhibits at least maintained on-target editing activity of the target site and reduced off-target activity compared to the wild-type of the CRISPR nuclease.

[0389] In an embodiment, the composition further comprises a recombinant nucleic acid molecule comprising a heterologous promoter operably linked to the nucleotide acid molecule comprising the sequence encoding the CRISPR nuclease.

[0390] In an embodiment, the CRISPR nuclease or nucleic acid molecule comprising a sequence encoding the CRISPR nuclease is non-naturally occurring or engineered.

[0391] This invention also provides a non-naturally occurring or engineered composition comprising a vector system comprising the nucleic acid molecule comprising a sequence encoding any of the CRISPR nucleases of the invention.

[0392] This invention also provides use of any of the compositions of the invention for the treatment of a subject afflicted with a disease associated with a genomic mutation comprising modifying a nucleotide sequence at a target site in the genome of the subject.

[0393] This invention provides a method of modifying a nucleotide sequence at a target site in the genome of a mammalian cell comprising introducing into the cell (i) a composition comprising a CRISPR nuclease having at least 95% identity to an amino acid sequence selected from the group consisting of SEQ ID NOs: 1-88 or a nucleic acid molecule comprising a sequence encoding a CRISPR nuclease which sequence has at least 95% identity to a nucleic acid sequence selected from the group consisting of SEQ ID NOs: 89-264 and (ii) a DNA-targeting RNA molecule, or a DNA polynucleotide encoding a DNA-targeting RNA molecule, comprising a nucleotide sequence that is complementary to a sequence in the target DNA.

[0394] In some embodiments, the method is performed ex vivo. In some embodiments, the method is performed in vivo. In some embodiments, some steps of the method are performed ex vivo and some steps are performed in vivo. In some embodiments the mammalian cell is a human cell.

[0395] In an embodiment, the method further comprises introducing into the cell: (iii) an RNA molecule comprising a tracrRNA sequence or a DNA polynucleotide encoding an RNA molecule comprising a tracrRNA sequence.

[0396] In an embodiment, the DNA-targeting RNA molecule comprises a crRNA repeat sequence.

[0397] In an embodiment, the RNA molecule comprising a tracrRNA sequence is able to bind the DNA-targeting RNA molecule.

[0398] In an embodiment, the DNA-targeting RNA molecule and the RNA molecule comprising a tracrRNA sequence interact to form an RNA complex, and the RNA complex is capable of forming an active complex with the CRISPR nuclease.

[0399] In an embodiment, the DNA-targeting RNA molecule and the RNA molecule comprising a nuclease-binding RNA sequence are fused in the form of a single guide RNA molecule that is suitable to form an active complex with the CRISPR nuclease.

[0400] In an embodiment, the guide sequence portion comprises a sequence complementary to a protospacer sequence.

[0401] In an embodiment, the CRISPR nuclease forms a complex with the DNA-targeting RNA molecule and effects a double strand break in the 3′ or 5′ of a Protospacer Adjacent Motif (PAM).

[0402] In an embodiment of any of the methods described herein, the method is for treating a subject afflicted with a disease associated with a genomic mutation comprising modifying a nucleotide sequence at a target site in the genome of the subject.

[0403] In an embodiment, the method comprises first selecting a subject afflicted with a disease associated with a genomic mutation and obtaining the cell from the subject.

[0404] This invention also provides a modified cell or cells obtained by any of the methods described herein. In an embodiment these modified cell or cells are capable of giving rise to progeny cells. In an embodiment these modified cell or cells are capable of giving rise to progeny cells after engraftment.

[0405] This invention also provides a composition comprising these modified cells and a pharmaceutically acceptable carrier. Also provided is an in vitro or ex vivo method of preparing this, comprising mixing the cells with the pharmaceutically acceptable carrier.

### DNA-Targeting RNA Molecules

[0406] The “guide sequence portion” of an RNA molecule refers to a nucleotide sequence that is capable of hybridizing to a specific target DNA sequence, e.g., the guide sequence portion has a nucleotide sequence which is partially or fully complementary to the DNA sequence being targeted along the length of the guide sequence portion. In some embodiments, the guide sequence portion is 17, 18, 19, 20, 21, 22, 23, 24, 25, 26, 27, 28, 29, 30, 31, 32, 33, 34, 35, 36, 37, 38, 39, 40, 41, 42, 43, 44, 45, 46, 47, 48, 49 or 50 nucleotides in length, or approximately 17-50, 17-49, 17-48, 17-47, 17-46, 17-45, 17-44, 17-43, 17-42, 17-41, 17-40, 17-39, 17-38, 17-37, 17-36, 17-35, 17-34, 17-33, 17-31, 17-30, 17-29, 17-28, 17-27, 17-26, 17-25, 17-24, 17-22, 17-21, 18-25, 18-24, 18-23, 18-22, 18-21, 19-25, 19-24, 19-23, 19-22, 19-21, 19-20, 20-22, 18-20, 20-21, 21-22, or 17-20 nucleotides in length. The entire length of the guide sequence portion is fully complementary to the DNA sequence being targeted along the length of the guide sequence portion. The guide sequence portion may be part of an RNA molecule that can form a complex with a CRISPR nuclease with the guide sequence portion serving as the DNA targeting portion of the CRISPR complex. When the DNA molecule having the guide sequence portion is present contemporaneously with the CRISPR molecule the RNA molecule is capable of targeting the CRISPR nuclease to the specific target DNA sequence. Each possibility represents a separate embodiment. An RNA molecule can be custom designed to target any desired sequence. Accordingly, a molecule comprising a “guide sequence portion” is a type of targeting molecule. Throughout this application, the terms “guide molecule,” “RNA guide molecule,” “guide RNA molecule,” and “gRNA molecule” are synonymous with a molecule comprising a guide sequence portion, and the term “spacer” is synonymous with a “guide sequence portion.”

[0407] In embodiments of the present invention, the CRISPR nuclease has its greatest cleavage activity when used with an RNA molecule comprising a guide sequence portion having 20, 21, 22, 23, 24, 25, 26, 27, 28, 29, or 30 nucleotides.

[0408] According to some aspects of the invention, the disclosed methods comprise a method of modifying a nucleotide sequence at a target site in a cell-free system or the genome of a cell comprising introducing into the cell the composition of any one of the embodiments described herein.

[0409] In some embodiments, the cell is a eukaryotic cell, preferably a mammalian cell or a plant cell. In some embodiments, genome modifying occurs within the nucleus of a cell.

[0410] According to some aspects of the invention, the disclosed methods comprise a use of any one of the compositions described herein for the treatment of a subject afflicted with a disease associated with a genomic mutation comprising modifying a nucleotide sequence at a target site in the genome of the subject.

[0411] According to some aspects of the invention, the disclosed methods comprise a method of treating subject having a mutation disorder comprising targeting any one of the compositions described herein to an allele associated with the mutation disorder.

[0412] In some embodiments, the mutation disorder is related to a disease or disorder selected from any of a neoplasia, age-related macular degeneration, schizophrenia, neurological, neurodegenerative, or movement disorder, Fragile X Syndrome, secretase-related disorders, prion-related disorders, ALS, addiction, autism, Alzheimer's Disease, neutropenia, inflammation-related disorders, Parkinson's Disease, blood and coagulation diseases and disorders, beta thalassemia, sickle cell anemia, cell dysregulation and oncology diseases and disorders, inflammation and immune-related diseases and disorders, metabolic, liver, kidney and protein diseases and disorders, muscular and skeletal diseases and disorders, dermatological diseases and disorders, neurological and neuronal diseases and disorders, and ocular diseases and disorders.

### Diseases and Therapies

[0413] Certain embodiments of the invention target a nuclease to a specific genetic locus associated with a disease or disorder as a form of gene editing, method of treatment, or therapy. For example, to induce editing or knockout of a gene, a novel nuclease disclosed herein may be specifically targeted to a pathogenic mutant allele of the gene using a custom designed guide RNA molecule. The guide RNA molecule is preferably designed by first considering the PAM requirement of the nuclease, which as shown herein is also dependent on the system in which the gene editing is being performed. For example, a guide RNA molecule designed to target an OMNI-140 nuclease to a target site is designed to contain a spacer region complementary to a DNA strand of a DNA double-stranded region that neighbors a OMNI-140 PAM sequence, e.g. “NNRDCM” or “NNRDCMY.” The guide RNA molecule is further preferably designed to contain a spacer region (i.e. the region of the guide RNA molecule having complementarity to the target allele) of sufficient and preferably optimal length in order to increase specific activity of the nuclease and reduce off-target effects.

[0414] As a non-limiting example, the guide RNA molecule may be designed to target the nuclease to a specific region of a mutant allele, e.g. near the start codon, such that upon DNA damage caused by the nuclease a non-homologous end joining (NHEJ) pathway is induced and leads to silencing of the mutant allele by introduction of frameshift mutations. This approach to guide RNA molecule design is particularly useful for altering the effects of dominant negative mutations and thereby treating a subject. As a separate non-limiting example, the guide RNA molecule may be designed to target a specific pathogenic mutation of a mutated allele, such that upon DNA damage caused by the nuclease a homology directed repair (HDR) pathway is induced and leads to template mediated correction of the mutant allele. This approach to guide RNA molecule design is particularly useful for altering haploinsufficiency effects of a mutated allele and thereby treating a subject.

[0415] Non-limiting examples of specific genes which may be targeted for alteration to treat a disease or disorder are presented herein below. Specific disease-associated genes and mutations that induce a mutation disorder are described in the literature. Such mutations can be used to design a DNA-targeting RNA molecule to target a CRISPR composition to an allele of the disease associated gene, where the CRISPR composition causes DNA damage and induces a DNA repair pathway to alter the allele and thereby treat the mutation disorder.

[0416] Mutations in the ELANE gene are associated with neutropenia. Accordingly, without limitation, embodiments of the invention that target ELANE may be used in methods of treating subjects afflicted with neutropenia.

[0417] CXCR4 is a co-receptor for the human immunodeficiency virus type 1 (HIV-1) infection. Accordingly, without limitation, embodiments of the invention that target CXCR4 may be used in methods of treating subjects afflicted with HIV-1 or conferring resistance to HIV-1 infection in a subject.

[0418] Programmed cell death protein 1 (PD-1) disruption enhances CAR-T cell mediated killing of tumor cells and PD-1 may be a target in other cancer therapies. Accordingly, without limitation, embodiments of the invention that target PD-1 may be used in methods of treating subjects afflicted with cancer. In an embodiment, the treatment is CAR-T cell therapy with T cells that have been modified according to the invention to be PD-1 deficient.

[0419] In addition, BCL11A is a gene that plays a role in the suppression of hemoglobin production. Globin production may be increased to treat diseases such as thalassemia or sickle cell anemia by inhibiting BCL11A. See for example, PCT International Publication No. WO 2017/077394A2; U.S. Publication No. US2011/0182867A1; Humbert et al. Sci. Transl. Med. (2019); and Canver et al. Nature (2015). Accordingly, without limitation, embodiments of the invention that target an enhancer of BCL11A may be used in methods of treating subjects afflicted with beta thalassemia or sickle cell anemia.

[0420] Embodiments of the invention may also be used for targeting any disease-associated gene, for studying, altering, or treating any of the diseases or disorders listed in Table A or Table B below. Indeed, any disease-associated with a genetic locus may be studied, altered, or treated by using the nucleases disclosed herein to target the appropriate disease-associated gene, for example, those listed in U.S. Publication No. 2018/0282762A1 and European Patent No. EP3079726B1.

TABLE A
Diseases, Disorders and their associated genes

| DISEASE/DISORDERS | GENE(S) |
|---|---|
| Neoplasia | PTEN; ATM; ATR; EGFR; ERBB2; ERBB3; ERBB4; Notch1; |
| | Notch2; Notch3; Notch4; AKT; AKT2; AKT3; HIF; HIF1a; |
| | HIF3a; Met; HRG; Bcl2; PPAR alpha; PPAR gamma; WT1 |
| | (Wilms Tumor); FGF Receptor Family members (5 members: 1, |
| | 2, 3, 4, 5); CDKN2a; APC; RB (retinoblastoma); MEN1; VHL; |
| | BRCA1; BRCA2; AR (Androgen Receptor); TSG101; IGF; IGF |
| | Receptor; Igf1 (4 variants); gf2 (3 variants); Igf 1 Receptor; Igf 2 |
| | Receptor; Bax; Bcl2; caspases family (9 members: 1, 2, 3, 4, 6, |
| | 7, 8, 9, 12); Kras; Apc |
| Age-related Macular | Abcr; Ccl2; Cc2; cp (ceruloplasmin); Timp3; cathepsinD; Vldlr; |
| Degeneration | Ccr2 |
| Schizophrenia | Neuregulin1 (Nrg1); Erb4 (receptor for Neuregulin); |
| | Complexin1 (Cp1x1); Tph1 Tryptophan hydroxylase; Tph2 |
| | Tryptophan hydroxylase 2; Neurexin 1; GSK3; GSK3a; GSK3b |
| Neurological, Neuro | 5-HTT (S1c6a4); COMT; DRD (Drd1a); SLC6A3; DAOA; |
| degenerative, and | DTNBP1; Dao (Dao1) |
| Movement Disorders | |
| Trinucleotide Repeat | HTT (Huntington's Dx); SBMA/SMAX1/AR (Kennedy's Dx); |
| Disorders | FXN/X25 (Friedrich's Ataxia); ATX3 (Machado-Joseph's Dx); |
| | ATXN1 and ATXN2 (spinocerebellar ataxias); DMPK |
| | (myotonic dystrophy); Atrophin-1 and Atn1 (DRPLA Dx); CBP |
| | (Creb-BP - global instability); VLDLR (Alzheimer's); Atxn7; |
| | Atxn10 |
| Fragile X Syndrome | FMR2; FXR1; FXR2; mGLUR5 |
| Secretase Related | APH-1 (alpha and beta); Presenilin (Psen1); nicastrin (Ncstn); |
| Disorders | PEN-2 |
| Others | Nos1; Parp1; Nat1; Nat2 |
| Prion related disorders | Prp |
| ALS | SOD1; ALS2; STEX; FUS; TARDBP; VEGF (VEGF-a; VEGF- |
| | b; VEGF-c) |
| Addiction | Prkce (alcohol); Drd2; Drd4; ABAT (alcohol); GRIA2; Grm5; |
| | Grin1; Htr1b; Grin2a; Drd3; Pdyn; Gria1 (alcohol) |
| Autism | Mecp2; BZRAP1; MDGA2; Sema5A; Neurexin 1; Fragile X |
| | (FMR2 (AFF2); FXR1; FXR2; Mglur5) |
| Alzheimer's Disease | E1; CHIP; UCH; UBB; Tau; LRP; PICALM; Clusterin; PS1; |
| | SORL1; CR1; Vldlr; Uba1; Uba3; CHIP28 (Aqp1, Aquaporin |
| | 1); Uchl1; Uchl3; APP |
| Inflammation | IL-10; IL-1 (IL-1a; IL-1b); IL-13; IL-17 (IL-17a (CTLA8); IL- |
| | 17b; IL-17c; IL-17d; IL-17f); II-23; Cx3cr1; ptpn22; TNFa; |
| | NOD2/CARD15 for IBD; IL-6; IL-12 (IL-12a; IL-12b); CTLA4; |
| | Cx3cl1 |
| Parkinson's Disease | x-Synuclein; DJ-1; LRRK2; Parkin; PINK1 |

TABLE B
Diseases, Disorders and their associated genes

| DISEASE CATEGORY | DISEASE AND ASSOCIATED GENES |
|---|---|
| Blood and coagulation | Anemia (CDAN1, CDA1, RPS19, DBA, PKLR, PK1, NT5C3, |
| diseases and disorders | UMPH1, PSN1, RHAG, RH50A, NRAMP2, SPTB, ALAS2, |
| | ANH1, ASB, ABCB7, ABC7, ASAT); Bare lymphocyte |
| | syndrome (TAPBP, TPSN, TAP2, ABCB3, PSF2, RING11, |
| | MHC2TA, C2TA, RFX5, RFXAP, RFX5), Bleeding disorders |
| | (TBXA2R, P2RX1, P2X1); Factor H and factor H-like 1 (HF1, |
| | CFH, HUS); Factor V and factor VIII (MCFD2); Factor VII |
| | deficiency (F7); Factor X deficiency (F10); Factor XI deficiency |
| | (F11); Factor XII deficiency (F12, HAF); Factor XIIIA |
| | deficiency (F13A1, F13A); Factor XIIIB deficiency (F13B); |
| | Fanconi anemia (FANCA, FACA, FA1, FA, FAA, FAAP95, |
| | FAAP90, FLJ34064, FANCB, FANCC, FACC, BRCA2, |
| | FANCD1, FANCD2, FANCD, FACD, FAD, FANCE, FACE, |
| | FANCF, XRCC9, FANCG, BRIP1, BACH1, FANCJ, PHF9, |
| | FANCL, FANCM, KIAA1596); Hemophagocytic |
| | lymphohistiocytosis disorders (PRF1, HPLH2, UNC13D, |
| | MUNC13-4, HPLH3, HLH3, FHL3); Hemophilia A (F8, F8C, |
| | HEMA); Hemophilia B (F9, HEMB), Hemorrhagic disorders |
| | (PI, ATT, F5); Leukocyde deficiencies and disorders (ITGB2, |
| | CD18, LCAMB, LAD, EIF2B1, EIF2BA, EIF2B2, EIF2B3, |
| | EIF2B5, LVWM, CACH, CLE, EIF2B4); Sickle cell anemia |
| | (HBB); Thalassemia (HBA2, HBB, HBD, LCRB, HBA1) |
| Cell dysregulation and | B-cell non-Hodgkin lymphoma (BCL7A, BCL7); Leukemia |
| oncology diseases and | (TAL1, TCL5, SCL, TAL2, FLT3, NBS1, NBS, ZNFN1A1, |
| disorders | IK1, LYF1, HOXD4, HOX4B, BCR, CML, PHL, ALL, ARNT, |
| | KRAS2, RASK2, GMPS, AF10, ARHGEF12, LARG, |
| | KIAA0382, CALM, CLTH, CEBPA, CEBP, CHIC2, BTL, |
| | FLT3, KIT, PBT, LPP, NPM1, NUP214, D9S46E, CAN, CAIN, |
| | RUNX1, CBFA2, AML1, WHSC1L1, NSD3, FLT3, AF1Q, |
| | NPM1, NUMA1, ZNF145, PLZF, PML, MYL, STAT5B, AF10, |
| | CALM, CLTH, ARL11, ARLTS1, P2RX7, P2X7, BCR, CML, |
| | PHL, ALL, GRAF, NF1, VRNF, WSS, NFNS, PTPN11, |
| | PTP2C, SHP2, NS1, BCL2, CCND1, PRAD1, BCL1, TCRA, |
| | GATA1, GF1, ERYF1, NFE1, ABL1, NQO1, DIA4, NMOR1, |
| | NUP214, D9S46E, CAN, CAIN) |
| Inflammation and immune | AIDS (KIR3DL1, NKAT3, NKB1, AMB11, KIR3DS1, IFNG, |
| related diseases and | CXCL12, SDF1); Autoimmune lymphoproliferative syndrome |
| disorders | (TNFRSF6, APT1, FAS, CD95, ALPS1A); Combined |
| | immunodeficiency, (IL2RG, SCIDX1, SCIDX, IMD4); HIV-1 |
| | (CCL5, SCYA5, D17S136E, TCP228), HIV susceptibility or |
| | infection (IL10, CSIF, CMKBR2, CCR2, CMKBR5, CCCKR5 |
| | (CCR5)); Immunodeficiencies (CD3E, CD3G, AICDA, AID, |
| | HIGM2, TNFRSF5, CD40, UNG, DGU, HIGM4, TNFSF5, |
| | CD40LG, HIGM1, IGM, FOXP3, IPEX, AIID, XPID, PIDX, |
| | TNFRSF14B, TACI); Inflammation (IL-10, IL-1 (IL-1a, IL-1b), |
| | IL-13, IL-17 (IL-17a (CTLA8), IL-17b, IL-17c, IL-17d, IL- |
| | 17f), II-23, Cx3cr1, ptpn22, TNFa, NOD2/CARD15 for IBD, |
| | IL-6, IL-12 (IL-12a, IL-12b), CTLA4, Cx3cl1); Severe |
| | combined immunodeficiencies (SCIDs)(JAK3, JAKL, |
| | DCLRE1C, ARTEMIS, SCIDA, RAG1, RAG2, ADA, PTPRC, |
| | CD45, LCA, IL7R, CD3D, T3D, IL2RG, SCIDX1, SCIDX, |
| | IMD4) |
| Metabolic, liver, kidney | Amyloid neuropathy (TTR, PALB); Amyloidosis (APOA1, |
| and protein diseases and | APP, AAA, CVAP, AD1, GSN, FGA, LYZ, TTR, PALB); |
| disorders | Cirrhosis (KRT18, KRT8, CIRH1A, NAIC, TEX292, |
| | KIAA1988); Cystic fibrosis (CFTR, ABCC7, CF, MRP7); |
| | Glycogen storage diseases (SLC2A2, GLUT2, G6PC, G6PT, |
| | G6PT1, GAA, LAMP2, LAMPB, AGL, GDE, GBE1, GYS2, |
| | PYGL, PFKM); Hepatic adenoma, 142330 (TCF1, HNF1A, |
| | MODY3), Hepatic failure, early onset, and neurologic disorder |
| | (SCOD1, SCO1), Hepatic lipase deficiency (LIPC), |
| | Hepatoblastoma, cancer and carcinomas (CTNNB1, PDGFRL, |
| | PDGRL, PRLTS, AXIN1, AXIN, CTNNB1, TP53, P53, LFS1, |
| | IGF2R, MPRI, MET, CASP8, MCH5; Medullary cystic kidney |
| | disease (UMOD, HNFJ, FJHN, MCKD2, ADMCKD2); |
| | Phenylketonuria (PAH, PKU1, QDPR, DHPR, PTS); Polycystic |
| | kidney and hepatic disease (FCYT, PKHD1, ARPKD, PKD1, |
| | PKD2, PKD4, PKDTS, PRKCSH, G19P1, PCLD, SEC63) |
| Muscular/Skeletal | Becker muscular dystrophy (DMD, BMD, MYF6), Duchenne |
| diseases and disorders | Muscular Dystrophy (DMD, BMD); Emery-Dreifuss muscular |
| | dystrophy (LMNA, LMN1, EMD2, FPLD, CMD1A, HGPS, |
| | LGMD1B, LMNA, LMN1, EMD2, FPLD, CMD1A); |
| | Facioscapulohumeral muscular dystrophy (FSHMD1A, |
| | FSHD1A); Muscular dystrophy (FKRP, MDC1C, LGMD2I, |
| | LAMA2, LAMM, LARGE, KIAA0609, MDCID, FCMD, |
| | TTID, MYOT, CAPN3, CANP3, DYSF, LGMD2B, SGCG, |
| | LGMD2C, DMDA1, SCG3, SGCA, ADL, DAG2, LGMD2D, |
| | DMDA2, SGCB, LGMD2E, SGCD, SGD, LGMD2F, CMD1L, |
| | TCAP, LGMD2G, CMD1N, TRIM32, HT2A, LGMD2H, |
| | FKRP, MDC1C, LGMD2I, TTN, CMD1G, TMD, LGMD2J, |
| | POMT1, CAV3, LGMD1C, SEPN1, SELN, RSMD1, PLEC1, |
| | PLTN, EBS1); Osteopetrosis (LRP5, BMND1, LRP7, LR3, |
| | OPPG, VBCH2, CLCN7, CLC7, OPTA2, OSTM1, GL, |
| | TCIRG1, TIRC7, OC116, OPTB1); Muscular atrophy (VAPB, |
| | VAPC, ALS8, SMN1, SMA1, SMA2, SMA3, SMA4, BSCL2, |
| | SPG17, GARS, SMAD1, CMT2D, HEXB, IGHMBP2, |
| | SMUBP2, CATF1, SMARD1) |
| Dermatological | Albinisim (TYR, OCA2, TYRP1, SLC45A2, LYST), |
| diseases and | Ectodermal dysplasias (EDAR, EDARADD, WNT10A), Ehlers- |
| disorders | Danlos syndrome (COL5A1, COL5A2, COL1A1, COL1A2, |
| | COL3A1, TNXB, ADAMTS2, PLOD1, FKBP14), Ichthyosis- |
| | associated disorders (FLG, STS, TGM1, ALOXE3/ALOX12B, |
| | KRT1, KRT10, ABCA12, KRT2, GJB2, TGM1, ABCA12, |
| | CYP4F22, ALOXE3, CERS3, NSHDL, EBP, MBTPS2, GJB2, |
| | SPINK5, AGHD5, PHYH, PEX7, ALDH3A2, ERCC2, ERCC3, |
| | GFT2H5, GBA), Incontinentia pigmenti (IKBKG, NEMO), |
| | Tuberous sclerosis (TSC1, TSC2), Premature aging syndromes |
| | (POLR3A, PYCR1, LMNA, POLD1, WRN, DMPK) |
| Neurological | ALS (SOD1, ALS2, STEX, FUS, TARDBP, VEGF (VEGF-a, |
| and Neuronal | VEGF-b, VEGF-c); Alzheimer disease (APP, AAA, CVAP, |
| diseases | AD1, APOE, AD2, PSEN2, AD4, STM2, APBB2, FE65L1, |
| and disorders | NOS3, PLAU, URK, ACE, DCP1, ACE1, MPO, PACIP1, |
| | PAXIP1L, PTIP, A2M, BLMH, BMH, PSEN1, AD3); Autism |
| | (Mecp2, BZRAP1, MDGA2, Sema5A, Neurexin 1, GLO1, |
| | MECP2, RTT, PPMX, MRX16, MRX79, NLGN3, NLGN4, |
| | KIAA1260, AUTSX2); Fragile X Syndrome (FMR2, FXR1, |
| | FXR2, mGLUR5); Huntington's disease and disease like |
| | disorders (HD, IT15, PRNP, PRIP, JPH3, JP3, HDL2, TBP, |
| | SCA17); Parkinson disease (NR4A2, NURR1, NOT, TINUR, |
| | SNCAIP, TBP, SCA17, SNCA, NACP, PARK1, PARK4, DJ1, |
| | PARK7, LRRK2, PARK8, PINK1, PARK6, UCHL1, PARK5, |
| | SNCA, NACP, PARK1, PARK4, PRKN, PARK2, PDJ, DBH, |
| | NDUFV2); Rett syndrome (MECP2, RTT, PPMX, MRX16, |
| | MRX79, CDKL5, STK9, MECP2, RTT, PPMX, MRX16, |
| | MRX79, x-Synuclein, DJ-1); Schizophrenia (Neuregulin1 |
| | (Nrg1), Erb4 (receptor for Neuregulin), Complexin1 (Cplx1), |
| | Tph1 Tryptophan hydroxylase, Tph2, Tryptophan hydroxylase 2, |
| | Neurexin 1, GSK3, GSK3a, GSK3b, 5-HTT (Slc6a4), COMT, |
| | DRD (Drd1a), SLC6A3, DAOA, DTNBP1, Dao (Dao1)); |
| | Secretase Related Disorders (APH-1 (alpha and beta), Presenilin |
| | (Psen1), nicastrin, (Ncstn), PEN-2, Nos1, Parp1, Natl, Nat2); |
| | Trinucleotide Repeat Disorders (HTT (Huntington's Dx), |
| | SBMA/SMAX1/AR (Kennedy's Dx), FXN/X25 (Friedrich's |
| | Ataxia), ATX3 (Machado-Joseph's Dx), ATXN1 and ATXN2 |
| | (spinocerebellar ataxias), DMPK (myotonic dystrophy), |
| | Atrophin-1 and Atn1 (DRPLA Dx), CBP (Creb-BP - global |
| | instability), VLDLR (Alzheimer's), Atxn7, Atxn10) |
| Ocular diseases and | Age-related macular degeneration (Abcr, Ccl2, Cc2, cp |
| disorders | (ceruloplasmin), Timp3, cathepsinD, Vldlr, Ccr2); Cataract |
| | (CRYAA, CRYA1, CRYBB2, CRYB2, PITX3, BFSP2, CP49, |
| | CP47, CRYAA, CRYA1, PAX6, AN2, MGDA, CRYBA1, |
| | CRYB1, CRYGC, CRYG3, CCL, LIM2, MP19, CRYGD, |
| | CRYG4, BFSP2, CP49, CP47, HSF4, CTM, HSF4, CTM, MIP, |
| | AQP0, CRYAB, CRYA2, CTPP2, CRYBB1, CRYGD, CRYG4, |
| | CRYBB2, CRYB2, CRYGC, CRYG3, CCL, CRYAA, CRYA1, |
| | GJA8, CX50, CAE1, GJA3, CX46, CZP3, CAE3, CCM1, CAM, |
| | KRIT1); Corneal clouding and dystrophy (APOA1, TGFBI, |
| | CSD2, CDGG1, CSD, BIGH3, CDG2, TACSTD2, TROP2, |
| | M1S1, VSX1, RINX, PPCD, PPD, KTCN, COL8A2, FECD, |
| | PPCD2, PIP5K3, CFD); Cornea plana congenital (KERA, |
| | CNA2); Glaucoma (MYOC, TIGR, GLC1A, JOAG, GPOA, |
| | OPTN, GLC1E, FIP2, HYPL, NRP, CYP1B1, GLC3A, OPA1, |
| | NTG, NPG, CYP1B1, GLC3A); Leber congenital |
| | amaurosis (CRB1, RP12, CRX, CORD2, CRD, RPGRIP1, |
| | LCA6, CORD9, RPE65, RP20, AIPL1, LCA4, GUCY2D, |
| | GUC2D, LCA1, CORD6, RDH12, LCA3); Macular dystrophy |
| | (ELOVL4, ADMD, STGD2, STGD3, RDS, RP7, PRPH2, |
| | PRPH, AVMD, AOFMD, VMD2) |

[0421] Unless otherwise defined, all technical and/or scientific terms used herein have the same meaning as commonly understood by one of ordinary skill in the art to which the invention pertains. Although methods and materials similar or equivalent to those described herein can be used in the practice or testing of embodiments of the invention, exemplary methods and/or materials are described below. In case of conflict, the patent specification, including definitions, will control. In addition, the materials, methods, and examples are illustrative only and are not intended to be necessarily limiting.

[0422] In the discussion unless otherwise stated, adjectives such as “substantially” and “about” modifying a condition or relationship characteristic of a feature or features of an embodiment of the invention, are understood to mean that the condition or characteristic is defined to within tolerances that are acceptable for operation of the embodiment for an application for which it is intended. Unless otherwise indicated, the word “or” in the specification and claims is considered to be the inclusive “or” rather than the exclusive or, and indicates at least one of and any combination of items it conjoins.

[0423] It should be understood that the terms “a” and “an” as used above and elsewhere herein refer to “one or more” of the enumerated components. It will be clear to one of ordinary skill in the art that the use of the singular includes the plural unless specifically stated otherwise. Therefore, the terms “a,” “an” and “at least one” are used interchangeably in this application.

[0424] For purposes of better understanding the present teachings and in no way limiting the scope of the teachings, unless otherwise indicated, all numbers expressing quantities, percentages or proportions, and other numerical values used in the specification and claims, are to be understood as being modified in all instances by the term “about.” Accordingly, unless indicated to the contrary, the numerical parameters set forth in the following specification and attached claims are approximations that may vary depending upon the desired properties sought to be obtained. At the very least, each numerical parameter should at least be construed in light of the number of reported significant digits and by applying ordinary rounding techniques.

[0425] It is understood that where a numerical range is recited herein, the present invention contemplates each integer between, and including, the upper and lower limits, unless otherwise stated.

[0426] In the description and claims of the present application, each of the verbs, “comprise,” “include” and “have” and conjugates thereof, are used to indicate that the object or objects of the verb are not necessarily a complete listing of components, elements or parts of the subject or subjects of the verb. Other terms as used herein are meant to be defined by their well-known meanings in the art.

[0427] The terms “polynucleotide”, “nucleotide”, “nucleotide sequence”, “nucleic acid” and “oligonucleotide” are used interchangeably. They refer to a polymeric form of nucleotides of any length, either deoxyribonucleotides or ribonucleotides, or analogs thereof. Polynucleotides may have any three-dimensional structure, and may perform any function, known or unknown. The following are non-limiting examples of polynucleotides: coding or non-coding regions of a gene or gene fragment, loci (locus) defined from linkage analysis, exons, in Irons, messenger RNA (mRNA), transfer RNA, ribosomal RNA, short interfering RNA (siRNA), short-hairpin RNA (shRNA), micro-RNA (miRNA), ribozymes, cDNA, recombinant polynucleotides, branched polynucleotides, plasmids, vectors, isolated DNA of any sequence, isolated RNA of any sequence, nucleic acid probes, and primers, A polynucleotide may comprise one or more modified nucleotides, such as methylated nucleotides and nucleotide analogs. If present, modifications to the nucleotide structure may be imparted before or after assembly of the polymer. The sequence of nucleotides may be interrupted by non-nucleotide components. A polynucleotide may be further modified after polymerization, such as by conjugation with a labeling component.

[0428] The term “nucleotide analog” or “modified nucleotide” refers to a nucleotide that contains one or more chemical modifications (e.g., substitutions), in or on the nitrogenous base of the nucleoside (e.g., cytosine (C), thymine (T) or uracil (U), adenine (A) or guanine (G)), in or on the sugar moiety of the nucleoside (e.g., ribose, deoxyribose, modified ribose, modified deoxyribose, six-membered sugar analog, or open-chain sugar analog), or the phosphate. Each of the RNA sequences described herein may comprise one or more nucleotide analogs.

[0429] As used herein, the following nucleotide identifiers are used to represent a referenced nucleotide base(s):

| | |
|---|---|
| Nucleotide | Base(s) |
| reference | represented |

| | | | | |
|---|---|---|---|---|
| A | A | | | |
| C | | C | | |
| G | | | G | |
| T | | | | T |
| W | A | | | T |
| S | | C | G | |
| M | A | C | | |
| K | | | G | T |
| R | A | | G | |
| Y | | C | | T |
| B | | C | G | T |
| D | A | | G | T |
| H | A | C | | T |
| V | A | C | G | |
| N | A | C | G | T |

[0430] As used herein, the term “targeting sequence” or “targeting molecule” refers a nucleotide sequence or molecule comprising a nucleotide sequence that is capable of hybridizing to a specific target sequence, e.g., the targeting sequence has a nucleotide sequence which is at least partially complementary to the sequence being targeted along the length of the targeting sequence. The targeting sequence or targeting molecule may be part of a targeting RNA molecule that can form a complex with a CRISPR nuclease either alone e.g. a sgRNA molecule, or upon hybridizing with another RNA molecule, e.g. a tracrRNA molecule, with the targeting sequence serving as the targeting portion of the CRISPR complex. When the molecule having the targeting sequence is present contemporaneously with the CRISPR molecule and forms an active complex with the CRISPR molecule, e.g. either alone as a sgRNA molecule or as part of a crRNA: tracrRNA complex, the RNA molecule is capable of targeting the CRISPR nuclease to the specific target sequence. Each possibility represents a separate embodiment. A targeting RNA molecule can be custom designed to target any desired sequence.

[0431] The term “targets” as used herein, refers to preferential hybridization of a targeting sequence or a targeting molecule to a nucleic acid having a targeted nucleotide sequence. It is understood that the term “targets” encompasses variable hybridization efficiencies, such that there is preferential targeting of the nucleic acid having the targeted nucleotide sequence, but unintentional off-target hybridization in addition to on-target hybridization might also occur. It is understood that where an RNA molecule targets a sequence, a complex of the RNA molecule and a CRISPR nuclease molecule targets the sequence for nuclease activity.

[0432] In the context of targeting a DNA sequence that is present in a plurality of cells, it is understood that the targeting encompasses hybridization of the guide sequence portion of the RNA molecule with the sequence in one or more of the cells, and also encompasses hybridization of the RNA molecule with the target sequence in fewer than all of the cells in the plurality of cells. Accordingly, it is understood that where an RNA molecule targets a sequence in a plurality of cells, a complex of the RNA molecule and a CRISPR nuclease is understood to hybridize with the target sequence in one or more of the cells, and also may hybridize with the target sequence in fewer than all of the cells. Accordingly, it is understood that the complex of the RNA molecule and the CRISPR nuclease introduces a double strand break in relation to hybridization with the target sequence in one or more cells and may also introduce a double strand break in relation to hybridization with the target sequence in fewer than all of the cells. As used herein, the term “modified cells” refers to cells in which a double strand break is affected by a complex of an RNA molecule and the CRISPR nuclease as a result of hybridization with the target sequence, i.e. on-target hybridization.

[0433] As used herein the term “wild type” is a term of the art understood by skilled persons and means the typical form of an organism, strain, gene or characteristic as it occurs in nature as distinguished from mutant or variant forms. Accordingly, as used herein, where a sequence of amino acids or nucleotides refers to a wild type sequence, a variant refers to variant of that sequence, e.g., comprising substitutions, deletions, insertions. As a non-limiting example, an engineered CRISPR nuclease is a variant CRISPR nuclease comprising at least one amino acid modification (e.g., substitution, deletion, and/or insertion) compared to the CRISPR nuclease of any of the CRISPR nuclease sequences listed in column 2 of Table 1. For example, a variant CRISPR nuclease may be a nickase or catalytically dead CRISPR nuclease having a substitution at one or more of the positions indicated in columns 5-7 of Table 1.

[0434] The terms “non-naturally occurring” or “engineered” are used interchangeably and indicate human manipulation. The terms, when referring to nucleic acid molecules or polypeptides may mean that the nucleic acid molecule or the polypeptide is at least substantially free from at least one other component with which they are naturally associated in nature and as found in nature.

[0435] As used herein the term “amino acid” includes natural and/or unnatural or synthetic amino acids, including glycine and both the D or I, optical isomers, and amino acid analogs and peptidomimetics.

[0436] As used herein, “genomic DNA” refers to linear and/or chromosomal DNA and/or to plasmid or other extrachromosomal DNA sequences present in the cell or cells of interest. In some embodiments, the cell of interest is a eukaryotic cell. In some embodiments, the cell of interest is a prokaryotic cell. In some embodiments, the methods produce double-stranded breaks (DSBs) or single-stranded breaks at pre-determined target sites in a genomic DNA sequence, resulting in mutation, insertion, and/or deletion of DNA sequences at the target site(s) in a genome. In some embodiments, the DNA target site in a genome is in the nucleus of a cell.

[0437] “Eukaryotic” cells include, but are not limited to, fungal cells (such as yeast), plant cells, animal cells, mammalian cells and human cells.

[0438] The term “nuclease” as used herein refers to an enzyme capable of cleaving the phosphodiester bonds between the nucleotide subunits of nucleic acid. A nuclease may be isolated or derived from a natural source. The natural source may be any living organism. Alternatively, a nuclease may be a modified or a synthetic protein which retains the phosphodiester bond cleaving activity.

[0439] The term “PAM” as used herein refers to a nucleotide sequence of a target DNA located in proximity to the targeted DNA sequence and recognized by the CRISPR nuclease. The PAM sequence may differ depending on the nuclease identity.

[0440] The term “mutation disorder” or “mutation disease” as used herein refers to any disorder or disease that is related to dysfunction of a gene caused by a mutation. A dysfunctional gene manifesting as a mutation disorder contains a mutation in at least one of its alleles and is referred to as a “disease-associated gene.” The mutation may be in any portion of the disease-associated gene, for example, in a regulatory, coding, or non-coding portion. The mutation may be any class of mutation, such as a substitution, insertion, or deletion. The mutation of the disease-associated gene may manifest as a disorder or disease according to the mechanism of any type of mutation, such as a recessive, dominant negative, gain-of-function, loss-of-function, or a mutation leading to haploinsufficiency of a gene product.

[0441] A skilled artisan will appreciate that embodiments of the present invention disclose RNA molecules capable of complexing with a nuclease, e.g. a CRISPR nuclease, such as to associate with a target genomic DNA sequence of interest next to a protospacer adjacent motif (PAM) or complementary sequence thereof. The nuclease then mediates cleavage of target DNA to create a double-stranded break within the protospacer.

[0442] In embodiments of the present invention, a CRISPR nuclease and a targeting molecule form a CRISPR complex that binds to a target DNA sequence to effect cleavage of the target DNA sequence. A CRISPR nuclease may form a CRISPR complex comprising the CRISPR nuclease and RNA molecule without a further, separate tracrRNA molecule. Alternatively, CRISPR nucleases may form a CRISPR complex between the CRISPR nuclease, an RNA molecule, and a tracrRNA molecule. For example, a crRNA molecule and a tracrRNA molecule may form a complex that targets a CRISPR nuclease to a target site, or a single-guide RNA molecule (sgRNA) may target the CRISPR nuclease to a target site.

[0443] The term “protein binding sequence” or “nuclease binding sequence” refers to a sequence capable of binding with a CRISPR nuclease to form a CRISPR complex. A skilled artisan will understand that a tracrRNA capable of binding with a CRISPR nuclease to form a CRISPR complex comprises a protein or nuclease binding sequence.

[0444] An “RNA binding portion” of a CRISPR nuclease refers to a portion of the CRISPR nuclease which may bind to an RNA molecule to form a CRISPR complex, e.g. the nuclease binding sequence of a tracrRNA molecule. An “activity portion” or “active portion” of a CRISPR nuclease refers to a portion of the CRISPR nuclease which effects a double strand break in a DNA molecule, for example when in complex with a DNA-targeting RNA molecule.

[0445] An RNA molecule may comprise a sequence sufficiently complementary to a tracrRNA molecule so as to hybridize to the tracrRNA via basepairing and promote the formation of a CRISPR complex. (See U.S. Pat. No. 8,906,616). In embodiments of the present invention, the RNA molecule may further comprise a portion having a tracr mate sequence.

[0446] In embodiments of the present invention, the targeting molecule may further comprise the sequence of a tracrRNA molecule. Such embodiments may be designed as a synthetic fusion of the RNA molecule that comprises a guide sequence portion (gRNA or crRNA) and the trans-activating crRNA molecule (tracrRNA), which forms a single guide RNA molecule (sgRNA). (See Jinek et al., Science (2012)). Embodiments of the present invention also include forming an active CRISPR complex utilizing a separate tracrRNA molecule and a separate RNA molecule comprising a guide sequence portion (e.g. a crRNA). In such embodiments the tracrRNA molecule may hybridize with the RNA molecule via base pairing and may be advantageous in certain applications of the invention described herein.

[0447] In embodiments of the present invention an RNA molecule may comprise a “nexus” region and/or “hairpin” regions which may further define the structure of the RNA molecule. (See Briner et al., Molecular Cell (2014)).

[0448] As used herein, the term “direct repeat sequence” refers to two or more repeats of a specific amino acid sequence of nucleotide sequence.

[0449] As used herein, an RNA sequence or molecule capable of “interacting with” or “binding” with a CRISPR nuclease refers to the RNA sequence or molecules ability to form a CRISPR complex with the CRISPR nuclease.

[0450] As used herein, the term “operably linked” refers to a relationship (i.e. fusion, hybridization) between two sequences or molecules permitting them to function in their intended manner. In embodiments of the present invention, when an RNA molecule is operably linked to a promoter, both the RNA molecule and the promotor are permitted to function in their intended manner.

[0451] As used herein, the term “heterologous promoter” refers to a promoter that does not naturally occur together with the molecule or pathway being promoted.

[0452] As used herein, a sequence or molecule has an X % “sequence identity” to another sequence or molecule if X % of bases or amino acids between the sequences of molecules are the same and in the same relative position. For example, a first nucleotide sequence having at least a 95% sequence identity with a second nucleotide sequence will have at least 95% of bases, in the same relative position, identical with the other sequence.

### Nuclear Localization Sequences

[0453] The terms “nuclear localization sequence” and “NLS” are used interchangeably to indicate an amino acid sequence/peptide that directs the transport of a protein with which it is associated from the cytoplasm of a cell across the nuclear envelope barrier. The term “NLS” is intended to encompass not only the nuclear localization sequence of a particular peptide, but also derivatives thereof that are capable of directing translocation of a cytoplasmic polypeptide across the nuclear envelope barrier. NLSs are capable of directing nuclear translocation of a polypeptide when attached to the N-terminus, the C-terminus, or both the N- and C-termini of the polypeptide. In addition, a polypeptide having an NLS coupled by its N- or C-terminus to amino acid side chains located randomly along the amino acid sequence of the polypeptide will be translocated. Typically, an NLS consists of one or more short sequences of positively charged lysines or arginines exposed on the protein surface, but other types of NLS are known. Non-limiting examples of NLSs include an NLS sequence derived from: the SV40 virus large T-antigen, nucleoplasmin, c-myc, the hRNPA1 M9 NLS, the IBB domain from importin-alpha, myoma T protein, human p53, mouse c-ab1 IV, influenza vims NS1, Hepatitis virus delta antigen, mouse Mx1 protein, human poly (ADP-ribose) polymerase, and the steroid hormone receptors (human) glucocorticoid.

### Delivery

[0454] The CRISPR nuclease or CRISPR compositions described herein may be delivered as a protein, DNA molecules, RNA molecules, Ribonucleoproteins (RNP), nucleic acid vectors, or any combination thereof. In some embodiments, the RNA molecule comprises a chemical modification. Non-limiting examples of suitable chemical modifications include 2′-O-methyl (M), 2′-O-methyl, 3′phosphorothioate (MS) or 2′-O-methyl, 3′thioPACE (MSP), pseudouridine, and 1-methyl pseudo-uridine. Each possibility represents a separate embodiment of the present invention.

[0455] The CRISPR nucleases and/or polynucleotides encoding same described herein, and optionally additional proteins (e.g., ZFPs, TALENs, transcription factors, restriction enzymes) and/or nucleotide molecules such as guide RNA may be delivered to a target cell by any suitable means. The target cell may be any type of cell e.g., eukaryotic or prokaryotic, in any environment e.g., isolated or not, maintained in culture, in vitro, ex vivo, in vivo or in planta. A target site in a target cell may be within the nucleus of the cell.

[0456] The compositions described herein may be introduced into a cell as part of a vector molecule having additional sequences such as, for example, replication origins, promoters and genes encoding antibiotic resistance. Moreover, compositions may introduced into a cell as naked nucleic acids or proteins, as nucleic acids or proteins complexed with or packaged within an agent such as a liposome, exosome, or poloxamer, or can be delivered by recombinant viruses (e.g., adenovirus, AAV, herpesvirus, retrovirus, lentivirus and integrase defective lentivirus (IDLV)) or virus-like particles. As non-limiting examples, the composition may be packaged into an adeno-associated virus (AAV), or into a lentivirus, such as a non-integrating lentivirus or a lentivirus lacking reverse transcription capability. Additional non-limiting examples include packaging the composition into liposomes, extracellular vesicles, or exosomes, which may be pseudotyped with vesicular stomatitis glycoprotein (VSVG) or conjugated to a cell-penetrating peptide, an antibody, a targeting moiety, or any combination thereof.

[0457] In some embodiments, the composition to be delivered includes mRNA of the nuclease and RNA of the guide. In some embodiments, the composition to be delivered includes mRNA of the nuclease, RNA of the guide and a donor template. In some embodiments, the composition to be delivered includes the CRISPR nuclease and guide RNA. In some embodiments, the composition to be delivered includes the CRISPR nuclease, guide RNA and a donor template for gene editing via, for example, homology directed repair. In some embodiments, the composition to be delivered includes mRNA of the nuclease, DNA-targeting RNA and the tracrRNA. In some embodiments, the composition to be delivered includes mRNA of the nuclease, DNA-targeting RNA and the tracrRNA and a donor template. In some embodiments, the composition to be delivered includes the CRISPR nuclease DNA-targeting RNA and the tracrRNA. In some embodiments, the composition to be delivered includes the CRISPR nuclease, DNA-targeting RNA and the tracrRNA and a donor template for gene editing via, for example, homology directed repair.

[0458] Any suitable viral vector system may be used to deliver RNA compositions. Conventional viral and non-viral based gene transfer methods can be used to introduce nucleic acids and/or CRISPR nuclease in cells (e.g., mammalian cells, plant cells, etc.) and target tissues. Such methods can also be used to administer nucleic acids encoding and/or CRISPR nuclease protein to cells in vitro. In certain embodiments, nucleic acids and/or CRISPR nuclease are administered for in vivo or ex vivo gene therapy uses. Non-viral vector delivery systems include naked nucleic acid, and nucleic acid complexed with a delivery vehicle such as a liposome or poloxamer. For a review of gene therapy procedures, see Anderson, Science (1992); Nabel and Felgner, TIBTECH (1993); Mitani and Caskey, TIBTECH (1993); Dillon, TIBTECH (1993); Miller, Nature (1992); Van Brunt, Biotechnology (1988); Vigne et al., Restorative Neurology and Neuroscience 8:35-36 (1995); Kremer and Perricaudet, British Medical Bulletin (1995); Haddada et al., Current Topics in Microbiology and Immunology (1995); and Yu et al., Gene Therapy 1:13-26 (1994).

[0459] Methods of non-viral delivery of nucleic acids and/or proteins include electroporation, lipofection, microinjection, biolistics, particle gun acceleration, virosomes, virus-like particles, exosomes, liposomes, immunoliposomes, polycation or lipid: nucleic acid conjugates, artificial virions, and agent-enhanced uptake of nucleic acids or can be delivered to plant cells by bacteria or viruses (e.g., Agrobacterium, Rhizobium sp. NGR234, Sinorhizoboiummeliloti, Mesorhizobium loti, tobacco mosaic virus, potato virus X, cauliflower mosaic virus and cassava vein mosaic virus. See, e.g., Chung et al. Trends Plant Sci. (2006). Sonoporation using, e.g., the Sonitron 2000 system (Rich-Mar) can also be used for delivery of nucleic acids. Cationic-lipid mediated delivery of proteins and/or nucleic acids is also contemplated as an in vivo or in vitro delivery method. See Zuris et al., Nat. Biotechnol. (2015), Coelho et al., N. Engl. J. Med. (2013); Judge et al., Mol. Ther. (2006); and Basha et al., Mol. Ther. (2011).

[0460] Non-viral vectors, such as transposon-based systems e.g. recombinant Sleeping Beauty transposon systems or recombinant PiggyBac transposon systems, may also be delivered to a target cell and utilized for transposition of a polynucleotide sequence of a molecule of the composition or a polynucleotide sequence encoding a molecule of the composition in the target cell.

[0461] Additional exemplary nucleic acid delivery systems include those provided by Amaxa® Biosystems (Cologne, Germany), Maxcyte, Inc. (Rockville, Md.), BTX Molecular Delivery Systems (Holliston, Mass.) and Copernicus Therapeutics Inc., (see for example U.S. Pat. No. 6,008,336). Lipofection is described in e.g., U.S. Pat. Nos. 5,049,386, 4,946,787; and 4,897,355) and lipofection reagents are sold commercially (e.g., Transfectam™, Lipofectin™ and Lipofectamine™ RNAiMAX). Cationic and neutral lipids that are suitable for efficient receptor-recognition lipofection of polynucleotides include those disclosed in PCT International Publication Nos. WO/1991/017424 and WO/1991/016024. Delivery can be to cells (ex vivo administration) or target tissues (in vivo administration).

[0462] The preparation of lipid: nucleic acid complexes, including targeted liposomes such as immunolipid complexes, is well known to one of skill in the art (see, e.g., Crystal, Science (1995); Blaese et al., Cancer Gene Ther. (1995); Behr et al., Bioconjugate Chem. (1994); Remy et al., Bioconjugate Chem. (1994); Gao and Huang, Gene Therapy (1995); Ahmad and Allen, Cancer Res., (1992); U.S. Pat. Nos. 4,186,183; 4,217,344; 4,235,871; 4,261,975; 4,485,054; 4,501,728; 4,774,085; 4,837,028; and 4,946,787).

[0463] Additional methods of delivery include the use of packaging the nucleic acids to be delivered into EnGeneIC delivery vehicles (EDVs). These EDVs are specifically delivered to target tissues using bispecific antibodies where one arm of the antibody has specificity for the target tissue and the other has specificity for the EDV. The antibody brings the EDVs to the target cell surface and then the EDV is brought into the cell by endocytosis. Once in the cell, the contents are released (see MacDiamid et al., Nature Biotechnology (2009)).

[0464] The use of RNA or DNA viral based systems for the delivery of nucleic acids take advantage of highly evolved processes for targeting a virus to specific cells in the body and trafficking the viral payload to the nucleus. Viral vectors can be administered directly to patients (in vivo) or they can be used to treat cells in vitro and the modified cells are administered to patients (ex vivo). Conventional viral based systems for the delivery of nucleic acids include, but are not limited to, recombinant retroviral, lentivirus, adenoviral, adeno-associated, vaccinia and herpes simplex virus vectors for gene transfer. However, an RNA virus is preferred for delivery of the RNA compositions described herein. Additionally, high transduction efficiencies have been observed in many different cell types and target tissues. Nucleic acid of the invention may be delivered by non-integrating lentivirus. Optionally, RNA delivery with Lentivirus is utilized. Optionally the lentivirus includes mRNA of the nuclease, RNA of the guide. Optionally the lentivirus includes mRNA of the nuclease, RNA of the guide and a donor template. Optionally, the lentivirus includes the nuclease protein, guide RNA. Optionally, the lentivirus includes the nuclease protein, guide RNA and/or a donor template for gene editing via, for example, homology directed repair. Optionally the lentivirus includes mRNA of the nuclease, DNA-targeting RNA, and the tracrRNA. Optionally the lentivirus includes mRNA of the nuclease, DNA-targeting RNA, and the tracrRNA, and a donor template. Optionally, the lentivirus includes the nuclease protein, DNA-targeting RNA, and the tracrRNA. Optionally, the lentivirus includes the nuclease protein, DNA-targeting RNA, and the tracrRNA, and a donor template for gene editing via, for example, homology directed repair.

[0465] As mentioned above, the compositions described herein may be delivered to a target cell using a non-integrating lentiviral particle method, e.g. a LentiFlash® system. Such a method may be used to deliver mRNA or other types of RNAs into the target cell, such that delivery of the RNAs to the target cell results in assembly of the compositions described herein inside of the target cell. See also PCT International Publication Nos. WO2013/014537, WO2014/016690, WO2016185125, WO2017194902, and WO2017194903.

[0466] The tropism of a retrovirus can be altered by incorporating foreign envelope proteins, expanding the potential target population of target cells. Lentiviral vectors are retroviral vectors capable of transducing or infecting non-dividing cells and typically produce high viral titers. Selection of a retroviral gene transfer system depends on the target tissue. Retroviral vectors are comprised of cis-acting long terminal repeats with packaging capacity for up to 6-10 kb of foreign sequence. The minimum cis-acting LTRs are sufficient for replication and packaging of the vectors, which are then used to integrate the therapeutic gene into the target cell to provide permanent transgene expression. Widely used retroviral vectors include those based upon murine leukemia virus (MuLV), gibbon ape leukemia virus (GaLV), Simian Immunodeficiency virus (SIV), human immunodeficiency virus (HIV), and combinations thereof (see, e.g., Buchscher Panganiban, J. Virol. (1992); Johann et al., J. Virol. (1992); Sommerfelt et al., Virol. (1990); Wilson et al., J. Virol. (1989); Miller et al., J. Virol. (1991); PCT International Publication No. WO/1994/026877A1).

[0467] At least six viral vector approaches are currently available for gene transfer in clinical trials, which utilize approaches that involve complementation of defective vectors by genes inserted into helper cell lines to generate the transducing agent.

[0468] pLASN and MFG-S are examples of retroviral vectors that have been used in clinical trials (Dunbar et al., Blood (1995); Kohn et al., Nat. Med. (1995); Malech et al., PNAS (1997)). PA317/pLASN was the first therapeutic vector used in a gene therapy trial. (Blaese et al., Science (1995)). Transduction efficiencies of 50% or greater have been observed for MFG-S packaged vectors. (Ellem et al., Immunol Immunother. (1997); Dranoff et al., Hum. Gene Ther. (1997).

[0469] Packaging cells are used to form virus particles that are capable of infecting a host cell. Such cells include 293 cells, which package adenovirus, AAV, and psi.2 cells or PA317 cells, which package retrovirus. Viral vectors used in gene therapy are usually generated by a producer cell line that packages a nucleic acid vector into a viral particle. The vectors typically contain the minimal viral sequences required for packaging and subsequent integration into a host (if applicable), other viral sequences being replaced by an expression cassette encoding the protein to be expressed. The missing viral functions are supplied in trans by the packaging cell line. For example, AAV vectors used in gene therapy typically only possess inverted terminal repeat (ITR) sequences from the AAV genome which are required for packaging and integration into the host genome. Viral DNA is packaged in a cell line, which contains a helper plasmid encoding the other AAV genes, namely rep and cap, but lacking ITR sequences. The cell line is also infected with adenovirus as a helper. The helper virus promotes replication of the AAV vector and expression of AAV genes from the helper plasmid. The helper plasmid is not packaged in significant amounts due to a lack of ITR sequences. Contamination with adenovirus can be reduced by, e.g., heat treatment to which adenovirus is more sensitive than AAV. Additionally, AAV can be produced at clinical scale using baculovirus systems (see U.S. Pat. No. 7,479,554).

[0470] In many gene therapy applications, it is desirable that the gene therapy vector be delivered with a high degree of specificity to a particular tissue type. Accordingly, a viral vector can be modified to have specificity for a given cell type by expressing a ligand as a fusion protein with a viral coat protein on the outer surface of the virus. The ligand is chosen to have affinity for a receptor known to be present on the cell type of interest. For example, Han et al., Proc. Natl. Acad. Sci. USA (1995), reported that Moloney murine leukemia virus can be modified to express human heregulin fused to gp70, and the recombinant virus infects certain human breast cancer cells expressing human epidermal growth factor receptor. This principle can be extended to other virus-target cell pairs, in which the target cell expresses a receptor and the virus expresses a fusion protein comprising a ligand for the cell-surface receptor. For example, filamentous phage can be engineered to display antibody fragments (e.g., FAB or Fv) having specific binding affinity for virtually any chosen cellular receptor. Although the above description applies primarily to viral vectors, the same principles can be applied to non-viral vectors. Such vectors can be engineered to contain specific uptake sequences which favor uptake by specific target cells.

[0471] Gene therapy vectors can be delivered in vivo by administration to an individual patient, typically by systemic administration (e.g., intravenous, intraperitoneal, intramuscular, subdermal, or intracranial infusion) or topical application, as described below. Alternatively, vectors can be delivered to cells ex vivo, such as cells explanted from an individual patient (e.g., lymphocytes, bone marrow aspirates, tissue biopsy) or universal donor hematopoietic stem cells, followed by reimplantation of the cells into a patient, usually after selection for cells which have incorporated the vector. In some embodiments, delivery of mRNA in vivo and ex vivo, and RNPs delivery may be utilized.

[0472] Ex vivo cell transfection for diagnostics, research, or for gene therapy (e.g., via re-infusion of the transfected cells into the host organism) is well known to those of skill in the art. In a preferred embodiment, cells are isolated from the subject organism, transfected with an RNA composition, and re-infused back into the subject organism (e.g., patient). Various cell types suitable for ex vivo transfection are well known to those of skill in the art (see, e.g., Freshney, “Culture of Animal Cells, A Manual of Basic Technique and Specialized Applications (6th edition, 2010)) and the references cited therein for a discussion of how to isolate and culture cells from patients).

[0473] Suitable cells include but not limited to eukaryotic and prokaryotic cells and/or cell lines. Non-limiting examples of such cells or cell lines generated from such cells include COS, CHO (e.g., CHO-S, CHO-K1, CHO-DG44, CHO-DUXB11, CHO-DUKX, CHOK1SV), VERO, MDCK, WI38, V79, B14AF28-G3, BHK, HaK, NSO, SP2/0-Ag14, HeLa, HEK293 (e.g., HEK293-F, HEK293-H, HEK293-T), and perC6 cells, any plant cell (differentiated or undifferentiated) as well as insect cells such as Spodopterafugiperda (Sf), or fungal cells such as Saccharomyces, Pichia and Schizosaccharomyces. In certain embodiments, the cell line is a CHO-K1, MDCK or HEK293 cell line. Additionally, primary cells may be isolated and used ex vivo for reintroduction into the subject to be treated following treatment with the nucleases (e.g. ZFNs or TALENs) or nuclease systems (e.g. CRISPR). Suitable primary cells include peripheral blood mononuclear cells (PBMC), and other blood cell subsets such as, but not limited to, CD4+ T cells or CD8+ T cells. Suitable cells also include stem cells such as, by way of example, embryonic stem cells, induced pluripotent stem cells, hematopoietic stem cells (CD34+), neuronal stem cells and mesenchymal stem cells.

[0474] In one embodiment, stem cells are used in ex vivo procedures for cell transfection and gene therapy. The advantage to using stem cells is that they can be differentiated into other cell types in-vitro or can be introduced into a mammal (such as the donor of the cells) where they will engraft in the bone marrow. Methods for differentiating CD34+ cells in vitro into clinically important immune cell types using cytokines such a GM-CSF, IFN-gamma. and TNF-alpha are known (as a non-limiting example see, Inaba et al., J. Exp. Med. (1992)).

[0475] Stem cells are isolated for transduction and differentiation using known methods. For example, stem cells are isolated from bone marrow cells by panning the bone marrow cells with antibodies which bind unwanted cells, such as CD4+ and CD8+ (T cells), CD45+ (panB cells), GR-1 (granulocytes), and lad (differentiated antigen presenting cells) (as a non-limiting example see Inaba et al., J. Exp. Med. (1992)). Stem cells that have been modified may also be used in some embodiments.

[0476] Notably, any one of the CRISPR nucleases described herein may be suitable for genome editing in post-mitotic cells or any cell which is not actively dividing, e.g., arrested cells. Examples of post-mitotic cells which may be edited using a CRISPR nuclease of the present invention include, but are not limited to, myocyte, a cardiomyocyte, a hepatocyte, an osteocyte and a neuron.

[0477] Vectors (e.g., retroviruses, liposomes, etc.) containing therapeutic RNA compositions can also be administered directly to an organism for transduction of cells in vivo. Alternatively, naked RNA or mRNA can be administered. Administration is by any of the routes normally used for introducing a molecule into ultimate contact with blood or tissue cells including, but not limited to, injection, infusion, topical application and electroporation. Suitable methods of administering such nucleic acids are available and well known to those of skill in the art, and, although more than one route can be used to administer a particular composition, a particular route can often provide a more immediate and more effective reaction than another route.

[0478] Vectors suitable for introduction of transgenes into immune cells (e.g., T-cells) include non-integrating lentivirus vectors. See, for example, U.S. Patent Publication No. 2009/0117617.

[0479] Pharmaceutically acceptable carriers are determined in part by the particular composition being administered, as well as by the particular method used to administer the composition. Accordingly, there is a wide variety of suitable formulations of pharmaceutical compositions available, as described below (see, e.g., Remington's Pharmaceutical Sciences, 17th ed., 1989).

### DNA Repair by Homologous Recombination

[0480] The term “homology-directed repair” or “HDR” refers to a mechanism for repairing DNA damage in cells, for example, during repair of double-stranded and single-stranded breaks in DNA. HDR requires nucleotide sequence homology and uses a “nucleic acid template” (nucleic acid template or donor template used interchangeably herein) to repair the sequence where the double-stranded or single break occurred (e.g., DNA target sequence). This results in the transfer of genetic information from, for example, the nucleic acid template to the DNA target sequence. HDR may result in alteration of the DNA target sequence (e.g., insertion, deletion, mutation) if the nucleic acid template sequence differs from the DNA target sequence and part or all of the nucleic acid template polynucleotide or oligonucleotide is incorporated into the DNA target sequence. In some embodiments, an entire nucleic acid template polynucleotide, a portion of the nucleic acid template polynucleotide, or a copy of the nucleic acid template is integrated at the site of the DNA target sequence.

[0481] The terms “nucleic acid template” and “donor”, refer to a nucleotide sequence that is inserted or copied into a genome. The nucleic acid template comprises a nucleotide sequence, e.g., of one or more nucleotides, that will be added to or will template a change in the target nucleic acid or may be used to modify the target sequence. A nucleic acid template sequence may be of any length, for example between 2 and 10,000 nucleotides in length (or any integer value there between or there above), preferably between about 100 and 1,000 nucleotides in length (or any integer there between), more preferably between about 200 and 500 nucleotides in length. A nucleic acid template may be a single stranded nucleic acid, a double stranded nucleic acid. In some embodiment, the nucleic acid template comprises a nucleotide sequence, e.g., of one or more nucleotides, that corresponds to wild type sequence of the target nucleic acid, e.g., of the target position. In some embodiment, the nucleic acid template comprises a ribonucleotide sequence, e.g., of one or more ribonucleotides, that corresponds to wild type sequence of the target nucleic acid, e.g., of the target position. In some embodiment, the nucleic acid template comprises modified ribonucleotides.

[0482] Insertion of an exogenous sequence (also called a “donor sequence,” donor template” or “donor”), for example, for correction of a mutant gene or for increased expression of a wild-type gene can also be carried out. It will be readily apparent that the donor sequence is typically not identical to the genomic sequence where it is placed. A donor sequence can contain a non-homologous sequence flanked by two regions of homology to allow for efficient HDR at the location of interest. Additionally, donor sequences can comprise a vector molecule containing sequences that are not homologous to the region of interest in cellular chromatin. A donor molecule can contain several, discontinuous regions of homology to cellular chromatin. For example, for targeted insertion of sequences not normally present in a region of interest, said sequences can be present in a donor nucleic acid molecule and flanked by regions of homology to sequence in the region of interest.

[0483] The donor polynucleotide can be DNA or RNA, single-stranded and/or double-stranded and can be introduced into a cell in linear or circular form. See, e.g., U.S. Patent Publication Nos. 2010/0047805; 2011/0281361; 2011/0207221; and 2019/0330620. If introduced in linear form, the ends of the donor sequence can be protected (e.g., from exonucleolytic degradation) by methods known to those of skill in the art. For example, one or more dideoxynucleotide residues are added to the 3′ terminus of a linear molecule and/or self-complementary oligonucleotides are ligated to one or both ends. See, for example, Chang and Wilson, Proc. Natl. Acad. Sci. USA (1987); Nehls et al., Science (1996). Additional methods for protecting exogenous polynucleotides from degradation include, but are not limited to, addition of terminal amino group(s) and the use of modified internucleotide linkages such as, for example, phosphorothioates, phosphoramidates, and O-methyl ribose or deoxyribose residues.

[0484] Accordingly, embodiments of the present invention using a donor template for repair may use a DNA or RNA, single-stranded and/or double-stranded donor template that can be introduced into a cell in linear or circular form. In embodiments of the present invention a gene-editing composition comprises: (1) an RNA molecule comprising a guide sequence to affect a double strand break in a gene prior to repair and (2) a donor RNA template for repair, and the RNA molecule comprising the guide sequence is a first RNA molecule and the donor RNA template is a second RNA molecule. In some embodiments, the guide RNA molecule and template RNA molecule are connected as part of a single molecule.

[0485] A donor sequence may also be an oligonucleotide and be used for gene correction or targeted alteration of an endogenous sequence. The oligonucleotide may be introduced to the cell on a vector, may be electroporated into the cell, or may be introduced via other methods known in the art. The oligonucleotide can be used to ‘correct’ a mutated sequence in an endogenous gene (e.g., the sickle mutation in beta globin), or may be used to insert sequences with a desired purpose into an endogenous locus.

[0486] A polynucleotide can be introduced into a cell as part of a vector molecule having additional sequences such as, for example, replication origins, promoters and genes encoding antibiotic resistance. Moreover, donor polynucleotides can be introduced as naked nucleic acid, as nucleic acid complexed with or packaged within an agent such as a liposome, exosome, or poloxamer, or can be delivered by recombinant viruses (e.g., adenovirus, AAV, herpesvirus, retrovirus, lentivirus and integrase defective lentivirus (IDLV)) or virus-like particles. Non-viral vectors, such as transposon-based systems, e.g. recombinant Sleeping Beauty transposon systems or recombinant PiggyBac transposon systems, may also be utilized for transposition of a polynucleotide sequence in a target cell.

[0487] The donor is generally inserted so that its expression is driven by the endogenous promoter at the integration site, namely the promoter that drives expression of the endogenous gene into which the donor is inserted. However, it will be apparent that the donor may comprise a promoter and/or enhancer, for example a constitutive promoter or an inducible or tissue specific promoter.

[0488] The donor molecule may be inserted into an endogenous gene such that all, some or none of the endogenous gene is expressed. For example, a transgene as described herein may be inserted into an endogenous locus such that some (N-terminal and/or C-terminal to the transgene) or none of the endogenous sequences are expressed, for example as a fusion with the transgene. In other embodiments, the transgene (e.g., with or without additional coding sequences such as for the endogenous gene) is integrated into any endogenous locus, for example a safe-harbor locus, for example a CCR5 gene, a CXCR4 gene, a PPP1R12c (also known as AAVS1) gene, an albumin gene or a Rosa gene. See, e.g., U.S. Pat. Nos. 7,951,925 and 8,110,379; U.S. Publication Nos. 2008/0159996; 20100/0218264; 2010/0291048; 2012/0017290; 2011/0265198; 2013/0137104; 2013/0122591; 2013/0177983 and 2013/0177960 and U.S. Provisional Application No. 61/823,689).

[0489] When endogenous sequences (endogenous or part of the transgene) are expressed with the transgene, the endogenous sequences may be full-length sequences (wild-type or mutant) or partial sequences. Preferably the endogenous sequences are functional. Non-limiting examples of the function of these full length or partial sequences include increasing the serum half-life of the polypeptide expressed by the transgene (e.g., therapeutic gene) and/or acting as a carrier.

[0490] Furthermore, although not required for expression, exogenous sequences may also include transcriptional or translational regulatory sequences, for example, promoters, enhancers, insulators, internal ribosome entry sites, sequences encoding 2A peptides and/or polyadenylation signals.

[0491] In certain embodiments, the donor molecule comprises a sequence selected from the group consisting of a gene encoding a protein (e.g., a coding sequence encoding a protein that is lacking in the cell or in the individual or an alternate version of a gene encoding a protein), a regulatory sequence and/or a sequence that encodes a structural nucleic acid such as a microRNA or siRNA.

[0492] For the foregoing embodiments, each embodiment disclosed herein is contemplated as being applicable to each of the other disclosed embodiment. For example, it is understood that any of the RNA molecules or compositions of the present invention may be utilized in any of the methods of the present invention.

[0493] As used herein, all headings are simply for organization and are not intended to limit the disclosure in any manner. The content of any individual section may be equally applicable to all sections.

[0494] Additional objects, advantages, and novel features of the present invention will become apparent to one ordinarily skilled in the art upon examination of the following examples, which are not intended to be limiting. Additionally, each of the various embodiments and aspects of the present invention as delineated hereinabove and as claimed in the claims section below finds experimental support in the following examples.

[0495] It is appreciated that certain features of the invention, which are, for clarity, described in the context of separate embodiments, may also be provided in combination in a single embodiment. Conversely, various features of the invention, which are, for brevity, described in the context of a single embodiment, may also be provided separately or in any suitable sub-combination or as suitable in any other described embodiment of the invention. Certain features described in the context of various embodiments are not to be considered essential features of those embodiments, unless the embodiment is inoperative without those elements.

[0496] Generally, the nomenclature used herein, and the laboratory procedures utilized in the present invention include molecular, biochemical, microbiological and recombinant DNA techniques. Such techniques are thoroughly explained in the literature. See, for example, Sambrook et al., “Molecular Cloning: A laboratory Manual” (1989); Ausubel, R. M. (Ed.), “Current Protocols in Molecular Biology” Volumes I-III (1994); Ausubel et al., “Current Protocols in Molecular Biology”, John Wiley and Sons, Baltimore, Maryland (1989); Perbal, “A Practical Guide to Molecular Cloning”, John Wiley & Sons, New York (1988); Watson et al., “Recombinant DNA”, Scientific American Books, New York; Birren et al. (Eds.), “Genome Analysis: A Laboratory Manual Series”, Vols. 1-4, Cold Spring Harbor Laboratory Press, New York (1998); Methodologies as set forth in U.S. Pat. Nos. 4,666,828; 4,683,202; 4,801,531; 5,192,659 and 5,272,057; Cellis, J. E. (Ed.), “Cell Biology: A Laboratory Handbook”, Volumes I-III (1994); Freshney, “Culture of Animal Cells-A Manual of Basic Technique” Third Edition, Wiley-Liss, N. Y. (1994); Coligan J. E. (Ed.), “Current Protocols in Immunology” Volumes I-III (1994); Stites et al. (Eds.), “Basic and Clinical Immunology” (8th Edition), Appleton & Lange, Norwalk, CT (1994); Mishell and Shiigi (Eds.), “Strategies for Protein Purification and Characterization-A Laboratory Course Manual” CSHL Press (1996); Clokie and Kropinski (Eds.), “Bacteriophage Methods and Protocols”, Volume 1: Isolation, Characterization, and Interactions (2009), all of which are incorporated by reference. Other general references are provided throughout this document.

[0497] Examples are provided below to facilitate a more complete understanding of the invention. The following examples illustrate the exemplary modes of making and practicing the invention. However, the scope of the invention is not limited to specific embodiments disclosed in these Examples, which are for purposes of illustration only.

### Experimental Details

[0498] Examples are provided below to facilitate a more complete understanding of the invention. The following examples illustrate the exemplary modes of making and practicing the invention. However, the scope of the invention is not limited to specific embodiments disclosed in these Examples, which are for purposes of illustration only.

[0499] CRISPR repeat (crRNA), trans-activating RNA (tracrRNA), nuclease polypeptide (OMNI), and protospacer adjacent motif (PAM) sequences were predicted from different metagenomic databases of sequences of environmental samples.

### Construction of OMNI Nuclease Polypeptides

[0500] For construction of novel nuclease polypeptides (OMNIs), the open reading frame of several identified OMNIs were codon optimized for human cell line expression. The ORF was cloned into the bacterial expression plasmid pET9a and into the mammalian expression plasmid pmOMNI (Table 4).

Prediction and Construction of sgRNA

[0501] For each OMNI the single guide RNA (sgRNA) was predicted by detection of the CRISPR repeat array sequence and a tracrRNA in the respective bacterial genome. The native pre-mature crRNA and tracrRNA sequences were connected in silico with a tetra-loop ‘gaaa’ sequence and the secondary structure elements of the duplex were predicted using an RNA secondary structure prediction tool.

[0502] The predicted secondary structures of the full duplex RNA elements (crRNA-tracrRNA chimera) was used for identification of possible tracrRNA sequences for the design of a sgRNA. Several possible sgRNA scaffolds versions were constructed by shortening the duplex at the upper stem at different locations (sgRNA designs of all OMNIs are listed in Table 2). Additionally, to overcome potential transcriptional and structural constraints and to assess the plasticity of the sgRNA scaffold in the human cellular environmental context, small changes in the nucleotide sequence of the possible sgRNA were made in some cases (FIG. 1, Table 2). Finally, up to three versions of possible designed scaffolds were synthesized for each OMNI and connected downstream to a 22nt universal unique spacer sequence (T2, SEQ ID NO: 1372) and cloned into a bacterial expressing plasmid under an inducible T7 promoter combined with a U6 promoter for mammalian expression (pShuttleGuide, Table 4).

(SEQ ID NO: 1372)
T2-GGAAGAGCAGAGCCTTGGTCTC

### In-Vitro Depletion Assay by TXTL

[0503] Depletion of PAM sequences in vitro was followed as described by Maxwell et al, Methods. 2018. Briefly, linear DNA expressing the OMNI nucleases and an sgRNA under T7 promoter were added to a cell-free transcription-translation in vitro system (TXTL mix, Arbor Bioscience) together with a linear construct expressing T7 polymerase. RNA expression and protein translation by the TXTL mix result in the formation of a ribonucleoprotein (RNP) complex. Since linear DNA was used, Chi6 DNA sequences were added to the TXTL reaction mix to inhibit the exonuclease activity of RecBCD, thereby protecting the linear DNA from degradation. The sgRNA spacer is designed to target a library of plasmids containing the target protospacer (pbPOS T2 library, Table 4) flanked by an 8N randomized set of potential PAM sequences. Depletion of PAM sequences from the library was measured by high-throughput sequencing using PCR to add the necessary adapters and indices to both the cleaved library and to a control library expressing a non-targeting gRNA. Following deep sequencing, the in vitro activity was confirmed by the fraction of the depleted sequences having the same PAM sequence relative to their occurrence in the control, indicating functional DNA cleavage by the OMNI nuclease (FIGS. 2-89, Table 3).

### Activity in Human Cells on Endogenous Genomic Targets

[0504] OMNI CRISPR nucleases were also assayed for their ability to promote editing on specific genomic locations in human cells. To this end, the human optimized ORF of each OMNI was cloned into an in-frame-P2A-mCherry expression vector (pmOMNI, Table 4) and each of their corresponding sgRNAs was cloned into a shuttle-guide vector (shuttle guide, Table 4). The sgRNA molecules were designed to contain a 22-nucleotide spacer that targets a specific location in the human genome (Table 5) according to the PAM preference of the nuclease, followed by the scaffold as discovered by TXTL (Table 3). Following 72 hours from transfection, cells were harvested, and half of the cells were used for quantification of the OMNI nuclease expression by measuring mCherry fluorescence as a marker using FACS. The rest of the cells were lysed and their genomic DNA was extracted. The extracted DNA was used as a template for PCR amplification of the corresponding genomic targets. Amplicons were subjected to NGS and the resulting reads were then used to calculate the percentage of editing events in their target sites. Short Insertions or deletions (indels) around the cut site are the typical outcome of repair of DNA ends following nuclease-induced DNA cleavage. The calculation of % editing was therefore deduced from the fraction of indel reads relative to the total aligned reads within each amplicon. The results of these experiments are summarized in Table 5.

TABLE 1
OMNI CRISPR nuclease sequences

| | | SEQ ID | SEQ ID | | | |
|---|---|---|---|---|---|---|
| | SEQ ID | NO of | NO of | | | |
| | NO of | DNA | DNA | | | |
| | Amino | sequence | sequence | | | |
| “OMNI” | Acid | encoding | codon | Nickase having inactivated | Nickase having | Dead nuclease having inactivated |
| Name | Sequence | OMNI | optimized | RuvC domain | inactivated HNH domain | RuvC and HNH domains |
| OMNI-117 | 1 | 89 | 177 | (D9 or E821 or H1059 or D1062) | (D927* or H928 or N951) | (D9 or E821 or H1059 or D1062) |
| | | | | | | and (D927* or H928 or N951) |
| OMNI-140 | 2 | 90 | 178 | (D11 or E499 or H730 or D733) | (D575* or H576 or N600) | (D11 or E499 or H730 or D733) |
| | | | | | | and (D575* or H576 or N600) |
| OMNI-150 | 3 | 91 | 179 | (D12 or E877 or H1131 or D1134) | (D976* or H977 or N1000) | (D12 or E877 or H1131 or D1134) |
| | | | | | | and (D976* or H977 or N1000) |
| OMNI-151 | 4 | 92 | 180 | (D10 or E562 or H798 or D801) | (D646* or H647 or N670) | (D10 or E562 or H798 or D801) |
| | | | | | | and (D646* or H647 or N670) |
| OMNI-152 | 5 | 93 | 181 | (D8 or E524 or H743 or D746) | (D603* or H604 or N627) | (D8 or E524 or H743 or D746) |
| | | | | | | and (D603* or H604 or N627) |
| OMNI-153 | 6 | 94 | 182 | (D8 or E546 or H823 or D826) | (E626* or H627 or N650) | (D8 or E546 or H823 or D826) |
| | | | | | | and (E626* or H627 or N650) |
| OMNI-154 | 7 | 95 | 183 | (D8 or E493 or H718 or D721) | (E576* or H577 or N600) | (D8 or E493 or H718 or D721) |
| | | | | | | and (E576* or H577 or N600) |
| OMNI-155 | 8 | 96 | 184 | (D8 or E493 or H718 or D721) | (E576* or H577 or N600) | (D8 or E493 or H718 or D721) |
| | | | | | | and (E576* or H577 or N600) |
| OMNI-156 | 9 | 97 | 185 | (D8 or E493 or H718 or D721) | (E576* or H577 or N600) | (D8 or E493 or H718 or D721) |
| | | | | | | and (E576* or H577 or N600) |
| OMNI-157 | 10 | 98 | 186 | (D8 or E520 or H743 or D746) | (E604* or H605 or N628) | (D8 or E520 or H743 or D746) |
| | | | | | | and (E604* or H605 or N628) |
| OMNI-158 | 11 | 99 | 187 | (D7 or E479 or H687 or D690) | (D556* or H557 or N580) | (D7 or E479 or H687 or D690) |
| | | | | | | and (D556* or H557 or N580) |
| OMNI-160 | 12 | 100 | 188 | (D8 or E719 or H970 or D973) | (E802* or H803 or N826) | (D8 or E719 or H970 or D973) |
| | | | | | | and (E802* or H803 or N826) |
| OMNI-161 | 13 | 101 | 189 | (D10 or E745 or H1069 or D1072) | (E870* or H871 or N894) | (D10 or E745 or H1069 or D1072) |
| | | | | | | and (E870* or H871 or N894) |
| OMNI-162 | 14 | 102 | 190 | (D8 or E729 or H1022 or D1025) | (E848* or H849 or N872) | (D8 or E729 or H1022 or D1025) |
| | | | | | | and (E848* or H849 or N872) |
| OMNI-163 | 15 | 103 | 191 | (D8 or E737 or H1061 or D1064) | (E866* or H867 or N890) | (D8 or E737 or H1061 or D1064) |
| | | | | | | and (E866* or H867 or N890) |
| OMNI-164 | 16 | 104 | 192 | (D8 or E709 or H1036 or D1039) | (E836* or H837 or N860) | (D8 or E709 or H1036 or D1039) |
| | | | | | | and (E836* or H837 or N860) |
| OMNI-165 | 17 | 105 | 193 | (D16 or E773 or H1099 or D1102) | (E899* or H900 or N923) | (D16 or E773 or H1099 or D1102) |
| | | | | | | and (E899* or H900 or N923) |
| OMNI-167 | 18 | 106 | 194 | (D8 or E702 or H953 or D956) | (E785* or H786 or N809) | (D8 or E702 or H953 or D956) |
| | | | | | | and (E785* or H786 or N809) |
| OMNI-168 | 19 | 107 | 195 | (D8 or E701 or H952 or D955) | (E784* or H785 or N808) | (D8 or E701 or H952 or D955) |
| | | | | | | and (E784* or H785 or N808) |
| OMNI-169 | 20 | 108 | 196 | (D8 or E721 or H1009 or D1012) | (E842* or H843 or N866) | (D8 or E721 or H1009 or D1012) |
| | | | | | | and (E842* or H843 or N866) |
| OMNI-170 | 21 | 109 | 197 | (D8 or E721 or H1010 or D1013) | (E843* or H844 or N867) | (D8 or E721 or H1010 or D1013) |
| | | | | | | and (E843* or H844 or N867) |
| OMNI-171 | 22 | 110 | 198 | (D8 or E722 or H1045 or D1048) | (E850* or H851 or N874) | (D8 or E722 or H1045 or D1048) |
| | | | | | | and (E850* or H851 or N874) |
| OMNI-172 | 23 | 111 | 199 | (D8 or E722 or H1045 or D1048) | (E850* or H851 or N874) | (D8 or E722 or H1045 or D1048) |
| | | | | | | and (E850* or H851 or N874) |
| OMNI-173 | 24 | 112 | 200 | (D8 or E722 or H1045 or D1048) | (E850* or H851 or N874) | (D8 or E722 or H1045 or D1048) |
| | | | | | | and (E850* or H851 or N874) |
| OMNI-174 | 25 | 113 | 201 | (D8 or E722 or H1045 or D1048) | (E850* or H851 or N874) | (D8 or E722 or H1045 or D1048) |
| | | | | | | and (E850* or H851 or N874) |
| OMNI-175 | 26 | 114 | 202 | (D8 or E722 or H1045 or D1048) | (E850* or H851 or N874) | (D8 or E722 or H1045 or D1048) |
| | | | | | | and (E850* or H851 or N874) |
| OMNI-176 | 27 | 115 | 203 | (D8 or E724 or H1047 or D1050) | (E849* or H850 or N873) | (D8 or E724 or H1047 or D1050) |
| | | | | | | and (E849* or H850 or N873) |
| OMNI-177 | 28 | 116 | 204 | (D8 or E699 or H950 or D953) | (E782* or H783 or N806) | (D8 or E699 or H950 or D953) |
| | | | | | | and (E782* or H783 or N806) |
| OMNI-180 | 29 | 117 | 205 | (D8 or E682 or H933 or D936) | (E765* or H766 or N789) | (D8 or E682 or H933 or D936) |
| | | | | | | and (E765* or H766 or N789) |
| OMNI-181 | 30 | 118 | 206 | (D8 or E682 or H933 or D936) | (E765* or H766 or N789) | (D8 or E682 or H933 or D936) |
| | | | | | | and (E765* or H766 or N789) |
| OMNI-182 | 31 | 119 | 207 | (D8 or E544 or H799 or D802) | (E627* or H628 or N651) | (D8 or E544 or H799 or D802) |
| | | | | | | and (E627* or H628 or N651) |
| OMNI-183 | 32 | 120 | 208 | (D9 or E740 or H1066 or D1069) | (E867* or H868 or N891) | (D9 or E740 or H1066 or D1069) |
| | | | | | | and (E867* or H868 or N891) |
| OMNI-184 | 33 | 121 | 209 | (D11 or E726 or H1055 or D1058) | (E858* or H859 or N882) | (D11 or E726 or H1055 or D1058) |
| | | | | | | and (E858* or H859 or N882) |
| OMNI-185 | 34 | 122 | 210 | (D8 or E726 or H1017 or D1020) | (D812* or H813 or N836) | (D8 or E726 or H1017 or D1020) |
| | | | | | | and (D812* or H813 or N836) |
| OMNI-186 | 35 | 123 | 211 | (D8 or E726 or H1017 or D1020) | (D812* or H813 or N836) | (D8 or E726 or H1017 or D1020) |
| | | | | | | and (D812* or H813 or N836) |
| OMNI-187 | 36 | 124 | 212 | (D8 or E726 or H1017 or D1020) | (D812* or H813 or N836) | (D8 or E726 or H1017 or D1020) |
| | | | | | | and (D812* or H813 or N836) |
| OMNI-188 | 37 | 125 | 213 | (D8 or E726 or H1017 or D1020) | (D812* or H813 or N836) | (D8 or E726 or H1017 or D1020) |
| | | | | | | and (D812* or H813 or N836) |
| OMNI-191 | 38 | 126 | 214 | (D7 or E557 or H805 or D808) | (E635* or H636 or N659) | (D7 or E557 or H805 or D808) |
| | | | | | | and (E635 or H636 or N659) |
| OMNI-192 | 39 | 127 | 215 | (D7 or E557 or H805 or D808) | (E635* or H636 or N659) | (D7 or E557 or H805 or D808) |
| | | | | | | and (E635* or H636 or N659) |
| OMNI-193 | 40 | 128 | 216 | (D7 or E557 or H805 or D808) | (E635* or H636 or N659) | (D7 or E557 or H805 or D808) |
| | | | | | | and (E635* or H636 or N659) |
| OMNI-194 | 41 | 129 | 217 | (D8 or E750 or H1076 or D1079) | (E879* or H880 or N903) | (D8 or E750 or H1076 or D1079) |
| | | | | | | and (E879* or H880 or N903) |
| OMNI-195 | 42 | 130 | 218 | (D8 or E750 or H1076 or D1079) | (E879* or H880 or N903) | (D8 or E750 or H1076 or D1079) |
| | | | | | | and (E879* or H880 or N903) |
| OMNI-196 | 43 | 131 | 219 | (D8 or E728 or H975 or D978) | (E811* or H812 or N835) | (D8 or E728 or H975 or D978) |
| | | | | | | and (E811* or H812 or N835) |
| OMNI-197 | 44 | 132 | 220 | (D8 or E566 or H821 or D824) | (E645* or H646 or N669) | (D8 or E566 or H821 or D824) |
| | | | | | | and (E645* or H646 or N669) |
| OMNI-198 | 45 | 133 | 221 | (D8 or E553 or H816 or D819) | (E633* or H634 or N657) | (D8 or E553 or H816 or D819) |
| | | | | | | and (E633* or H634 or N657) |
| OMNI-200 | 46 | 134 | 222 | (D8 or E704 or H962 or D965) | (D783* or H784 or N807) | (D8 or E704 or H962 or D965) |
| | | | | | | and (D783* or H784 or N807) |
| OMNI-201 | 47 | 135 | 223 | (D8 or E743 or H1067 or D1070) | (E869* or H870 or N893) | (D8 or E743 or H1067 or D1070) |
| | | | | | | and (E869* or H870 or N893) |
| OMNI-203 | 48 | 136 | 224 | (D10 or E741 or H1065 or D1068) | (E870* or H871 or N894) | (D10 or E741 or H1065 or D1068) |
| | | | | | | and (E870* or H871 or N894) |
| OMNI-205 | 49 | 137 | 225 | (D10 or E761 or H1084 or D1087) | (E888* or H889 or N912) | (D10 or E761 or H1084 or D1087) |
| | | | | | | and (E888* or H889 or N912) |
| OMNI-206 | 50 | 138 | 226 | (D8 or E757 or H1088 or D1091) | (E882* or H883 or N906) | (D8 or E757 or H1088 or D1091) |
| | | | | | | and (E882* or H883 or N906) |
| OMNI-207 | 51 | 139 | 227 | (D8 or E740 or H1065 or D1068) | (E870* or H871 or N894) | (D8 or E740 or H1065 or D1068) |
| | | | | | | and (E870* or H871 or N894) |
| OMNI-208 | 52 | 140 | 228 | (D8 or E735 or H1057 or D1060) | (E859* or H860 or N883) | (D8 or E735 or H1057 or D1060) |
| | | | | | | and (E859* or H860 or N883) |
| OMNI-209 | 53 | 141 | 229 | (D8 or E685 or H1012 or D1015) | (E814* or H815 or N838) | (D8 or E685 or H1012 or D1015) |
| | | | | | | and (E814*or H815 or N838) |
| OMNI-211 | 54 | 142 | 230 | (D9 or E718 or H1013 or D1016) | (E839* or H840 or N863) | (D9 or E718 or H1013 or D1016) |
| | | | | | | and (E839* or H840 or N863) |
| OMNI-212 | 55 | 143 | 231 | (D11 or E742 or H1066 or D1069) | (E871* or H872 or N895) | (D11 or E742 or H1066 or D1069) |
| | | | | | | and (E871* or H872 or N895) |
| OMNI-213 | 56 | 144 | 232 | (D7 or E569 or H817 or D820) | (E648* or H649 or N672) | (D7 or E569 or H817 or D820) |
| | | | | | | and (E648* or H649 or N672) |
| OMNI-214 | 57 | 145 | 233 | (D27 or E702 or H952 or D955) | (E785* or H786 or N809) | (D27 or E702 or H952 or D955) |
| | | | | | | and (E785* or H786 or N809) |
| OMNI-215 | 58 | 146 | 234 | (D7 or E569 or H817 or D820) | (E648* or H649 or N672) | (D7 or E569 or H817 or D820) |
| | | | | | | and (E648* or H649 or N672) |
| OMNI-216 | 59 | 147 | 235 | (D7 or E569 or H817 or D820) | (E648* or H649 or N672) | (D7 or E569 or H817 or D820) |
| | | | | | | and (E648* or H649 or N672) |
| OMNI-217 | 60 | 148 | 236 | (D9 or E711 or H962 or D965) | (E791* or H792 or N815) | (D9 or E711 or H962 or D965) |
| | | | | | | and (E791* or H792 or N815) |
| OMNI-219 | 61 | 149 | 237 | (D8 or E595 or H854 or D857) | (E681* or H682 or N705) | (D8 or E595 or H854 or D857) |
| | | | | | | and (E681* or H682 or N705) |
| OMNI-220 | 62 | 150 | 238 | (D8 or E592 or H836 or D839) | (E671* or H672 or N695) | (D8 or E592 or H836 or D839) |
| | | | | | | and (E671* or H672 or N695) |
| OMNI-222 | 63 | 151 | 239 | (D10 or E714 or H1041 or D1044) | (E841* or H842 or N865) | (D10 or E714 or H1041 or D1044) |
| | | | | | | and (E841* or H842 or N865) |
| OMNI-223 | 64 | 152 | 240 | (D10 or E714 or H1041 or D1044) | (E841* or H842 or N865) | (D10 or E714 or H1041 or D1044) |
| | | | | | | and (E841* or H842 or N865) |
| OMNI-226 | 65 | 153 | 241 | (D11 or E778 or H1000 or D1003) | (D863* or H864 or N888) | (D11 or E778 or H1000 or D1003) |
| | | | | | | and (D863* or H864 or N888) |
| OMNI-227 | 66 | 154 | 242 | (D9 or E759 or H973 or D976) | (D840* or H841 or N864) | (D9 or E759 or H973 or D976) |
| | | | | | | and (D840* or H841 or N864) |
| OMNI-229 | 67 | 155 | 243 | (D10 or E801 or H1036 or D1039) | (D887* or H888 or N912) | (D10 or E801 or H1036 or D1039) |
| | | | | | | and (D887* or H888 or N912) |
| OMNI-231 | 68 | 156 | 244 | (D11 or E791 or H1002 or D1005) | (D870* or H871 or N894) | (D11 or E791 or H1002 or D1005) |
| | | | | | | and (D870* or H871 or N894) |
| OMNI-232 | 69 | 157 | 245 | (D11 or E789 or H1001 or D1004) | (D868* or H869 or N892) | (D11 or E789 or H1001 or D1004) |
| | | | | | | and (D868* or H869 or N892) |
| OMNI-233 | 70 | 158 | 246 | (D10 or E798 or H1013 or D1016) | (D880* or H881 or N905) | (D10 or E798 or H1013 or D1016) |
| | | | | | | and (D880* or H881 or N905) |
| OMNI-234 | 71 | 159 | 247 | (D10 or E798 or H1013 or D1016) | (D880* or H881 or N905) | (D10 or E798 or H1013 or D1016) |
| | | | | | | and (D880* or H881 or N905) |
| OMNI-235 | 72 | 160 | 248 | (D10 or E798 or H1013 or D1016) | (D880* or H881 or N905) | (D10 or E798 or H1013 or D1016) |
| | | | | | | and (D880* or H881 or N905) |
| OMNI-236 | 73 | 161 | 249 | (D10 or E798 or H1013 or D1016) | (D880* or H881 or N905) | (D10 or E798 or H1013 or D1016) |
| | | | | | | and (D880* or H881 or N905) |
| OMNI-238 | 74 | 162 | 250 | (D11 or E777 or H998 or D1001) | (D866* or H867 or N890) | (D11 or E777 or H998 or D1001) |
| | | | | | | and (D866* or H867 or N890) |
| OMNI-239 | 75 | 163 | 251 | (D10 or E799 or H1036 or D1039) | (D898* or H899 or N922) | (D10 or E799 or H1036 or D1039) |
| | | | | | | and (D898* or H899 or N922) |
| OMNI-240 | 76 | 164 | 252 | (D15 or E782 or H997 or D1000) | (D865* or H866 or N889) | (D15 or E782 or H997 or D1000) |
| | | | | | | and (D865* or H866 or N889) |
| OMNI-241 | 77 | 165 | 253 | (D9 or E768 or H990 or D993) | (D855* or H856 or N879) | (D9 or E768 or H990 or D993) |
| | | | | | | and (D855* or H856 or N879) |
| OMNI-242 | 78 | 166 | 254 | (D9 or E768 or H990 or D993) | (D855* or H856 or N879) | (D9 or E768 or H990 or D993) |
| | | | | | | and (D855* or H856 or N879) |
| OMNI-243 | 79 | 167 | 255 | (D12 or E806 or H1041 or D1044) | (D890* or H891 or D915) | (D12 or E806 or H1041 or D1044) |
| | | | | | | and (D890* or H891 or D915) |
| OMNI-244 | 80 | 168 | 256 | (D9 or E792 or H1009 or D1012) | (D873* or H874 or N897) | (D9 or E792 or H1009 or D1012) |
| | | | | | | and (D873* or H874 or N897) |
| OMNI-245 | 81 | 169 | 257 | (D13 or E814 or H1042 or D1045) | (D906* or H907 or N930) | (D13 or E814 or H1042 or D1045) |
| | | | | | | and (D906* or H907 or N930) |
| OMNI-247 | 82 | 170 | 258 | (D9 or E809 or H1033 or D1036) | (D892* or H893 or N916) | (D9 or E809 or H1033 or D1036) |
| | | | | | | and (D892* or H893 or N916) |
| OMNI-250 | 83 | 171 | 259 | (D9 or E809 or H1033 or D1036) | (D892* or H893 or N916) | (D9 or E809 or H1033 or D1036) |
| | | | | | | and (D892* or H893 or N916) |
| OMNI-254 | 84 | 172 | 260 | (D11 or E846 or H1094 or D1097) | (D939* or H940 or N963) | (D11 or E846 or H1094 or D1097) |
| | | | | | | and (D939* or H940 or N963) |
| OMNI-256 | 85 | 173 | 261 | (D13 or E765 or H983 or D986) | (D846* or H847 or N870) | (D13 or E765 or H983 or D986) |
| | | | | | | and (D846* or H847 or N870) |
| OMNI-257 | 86 | 174 | 262 | (D9 or E775 or H985 or D988) | (D853* or H854 or N877) | (D9 or E775 or H985 orD988) |
| | | | | | | and (D853* or H854 or N877) |
| OMNI-260 | 87 | 175 | 263 | (D8 or E510 or H747 or D750) | (D596* or H597 or N620) | (D8 or E510 or H747 or D750) |
| | | | | | | and (D596* or H597 or N620) |
| OMNI-262 | 88 | 176 | 264 | (D12 or E551 or H789 or D792) | (D638* or H639 or N662) | (D12 or E551 or H789 or D792) |
| | | | | | | and (D638* or H639 or N662) |

Table 1. OMNI nuclease sequences: Table 1 lists the OMNI name, its corresponding nuclease protein sequence, its DNA sequence, its human optimized DNA sequence, alternative positions to be substituted to generate a nickase having an inactivated RUVC domain, alternative positions to be substituted to generate a nickase having an inactivated HNH domain, and alternative positions to be substituted to generate a catalytically dead nuclease having inactivated RUVC and HNH domains. Substitution to any other amino acid is permissible for each of the amino acid positions indicated in columns 5-7, except if followed by an asterisk, which indicates that any substitution other than aspartic acid (D) to glutamic acid (E) or glutamic acid (E) to aspartic acid (D) results in inactivation.

TABLE 2
OMNI Guide Sequences

| | | OMNI-117 with sgRNA 1 | OMNI-140 with sgRNA 2 |
|---|---|---|---|
| crRNA: | crRNA | GUUAUUUUGAAUACUA (SEQ | GCUGGGGUUCAACUCU (SEQ ID |
| tracrRNA | (Repeat) | ID NO: 265) | NO: 279) |
| duplex V1 | Partial | GUUAUUUUGAAUACU (SEQ ID | GCUGGGGUUCAACUC (SEQ ID |
| | crRNA 1 | NO: 266) | NO: 280) |
| | Partial | GUUAUUUUGAAU (SEQ ID NO: | GCUGGGGUUCAA (SEQ ID NO: |
| | crRNA 2 | 267) | 281) |
| | Partial | GUUAUUUUGA (SEQ ID NO: | GCUGGGGUUC (SEQ ID NO: 282) |
| | crRNA 3 | 268) | |
| | tracrRNA | GUGUAUUUAAAGUAA (SEQ ID | AGAGUUGAACCUCAGU (SEQ ID |
| | (Antirepeat) | NO: 269) | NO: 283) |
| | Partial | UGUAUUUAAAGUAA (SEQ ID | GAGUUGAACCUCAGUA (SEQ ID |
| | tracrRNA 1 | NO: 270) | NO: 284) |
| | Partial | AUUUAAAGUAA (SEQ ID NO: | UUGAACCUCAGUA (SEQ ID NO: |
| | tracrRNA 2 | 271) | 285) |
| | Partial | UUAAAGUAA | GAACCUCAGUA (SEQ ID NO: 286) |
| | tracrRNA 3 | | |
| TracrRNA | tracrRNA | AUAAAAAGUUAAAUUUAAAG | AAACACCGGCUAGUUUUCGGUG |
| sequences | Portion 1 | AUAAAAGUAAAUAAUUAGUA | UCGAUUGCUCC (SEQ ID NO: 287) |
| | | AAUUAACUUCU (SEQ ID NO: | |
| | | 272) | |
| | tracrRNA | Not listed | ACACCGGCUAGUUUUCGGUGU |
| | Portion 1- | | (SEQ ID NO: 288) |
| | partial | | |
| | tracrRNA | GAUAAUGUGAAAUUCAUUUG | AAGCCGGUAACACAAUUGUUAC |
| | Portion 2 | UUUUUU (SEQ ID NO: 273) | CGGCUUCUUUUUU (SEQ ID NO: |
| | | | 289) |
| | tracrRNA | GAUAAUGUGAAAUUCAUUUG | AAGCCGGUAACACAAUUGUUAC |
| | Portion 2- | (SEQ ID NO: 274) | CGGCUUC (SEQ ID NO: 290) |
| | polyT | | |
| sgRNA | sgRNA V1 | GUUAUUUUGAAUACUAgaaaG | GCUGGGGUUCAACUCUgaaaAGA |
| Versions | | UGUAUUUAAAGUAAAUAAAA | GUUGAACCUCAGUAAACACCGG |
| | | AGUUAAAUUUAAAGAUAAAA | CUAGUUUUCGGUGUCGAUUGCU |
| | | GUAAAUAAUUAGUAAAUUAA | CCAAGCCGGUAACACAAUUGUU |
| | | CUUCUGAUAAUGUGAAAUUC | ACCGGCUUCUUUUUU (SEQ ID |
| | | AUUUGUUUUUU (SEQ ID NO: | NO: 291) |
| | | 275) | |
| | sgRNA V2 | GUUACUUUGAAUACUAgaaaG | GCUGGGGUUCAACUCUgaaaAGA |
| | | UGUAUUUAAAGUAAAUAAAA | GUUGAACCUCAGUAAACACCGG |
| | | AGUUAAAUUUAAAGAUAAAA | CUAGCUUUCGGUGUCGAUUGCU |
| | | GUAAAUAAUUAGUAAAUUAA | CCAAGCCGGUAACACAAUUGUU |
| | | CUUCUGAUAAUGUGAAAUUC | ACCGGCUUCUUUUUU (SEQ ID |
| | | AUUUGUUUUUU (SEQ ID NO: | NO: 292) |
| | | 276) | |
| | sgRNA V2 | GUUACUUUGAAUACUA (SEQ | Not listed |
| | crRNA | ID NO: 277) | |
| | (Repeat) | | |
| | sgRNA V2 | AAGGUAUUACCUUAAGC (SEQ | AAACACCGGCUAGCUUUCGGUG |
| | Modified | ID NO: 278) | UCGAUUGCUCC (SEQ ID NO: 293) |
| | Portion 1 | | |
| | | OMNI-150 with sgRNA 3 | OMNI-151 with sgRNA 4 |
| crRNA: | crRNA | GUCUUGGAGUAUUGUGA (SEQ | GUUACAGGACCCUGUUGAU (SEQ |
| tracrRNA | (Repeat) | ID NO: 294) | ID NO: 306) |
| duplex V1 | Partial | GUCUUGGAGUAUUGU (SEQ ID | GUUACAGGACCCUGU (SEQ ID |
| | crRNA 1 | NO: 295) | NO: 307) |
| | Partial | GUCUUGGAGUAU (SEQ ID NO: | GUUACAGGACCC (SEQ ID NO: |
| | crRNA 2 | 296) | 308) |
| | Partial | GUCUUGGAGU (SEQ ID NO: | GUUACAGGAC (SEQ ID NO: 309) |
| | crRNA 3 | 297) | |
| | tracrRNA | UCACAACACGAGUCAAGAU | GUUUACAGGUUUCUGUAAU |
| | (Antirepeat) | (SEQ ID NO: 298) | (SEQ ID NO: 310) |
| | Partial | ACAACACGAGUCAAGAUA | ACAGGUUUCUGUAAUA (SEQ ID |
| | tracrRNA 1 | (SEQ ID NO: 299) | NO: 311) |
| | Partial | ACACGAGUCAAGAUA (SEQ ID | GGUUUCUGUAAUA (SEQ ID NO: |
| | tracrRNA 2 | NO: 300) | 312) |
| | Partial | ACGAGUCAAGAUA (SEQ ID | UUUCUGUAAUA (SEQ ID NO: 313) |
| | tracrRNA 3 | NO: 301) | |
| TracrRNA | tracrRNA | AAAGAUUUAUCCUAACCGGU | AAGGCAUAAUGCCUUAGGU |
| sequences | Portion 1 | ACUUGUACCU (SEQ ID NO: | (SEQ ID NO: 314) |
| | | 302) | |
| | tracrRNA | Not listed | AAGGCAUAAUGCCUU (SEQ ID |
| | Portion 1- | | NO: 315) |
| | partial | | |
| | tracrRNA | GCCCUGUAGGGGGCUUUUUU | UUGAUCUAACCAUAAAGAUCAA |
| | Portion 2 | (SEQ ID NO: 303) | (SEQ ID NO: 316) |
| | tracrRNA | GCCCUGUAGGGGGC (SEQ ID | Not listed |
| | Portion 2- | NO: 304) | |
| | polyT | | |
| | tracrRNA | Not listed | AACAGACUUCGGUCUGUUUUUU |
| | Portion 3- | | (SEQ ID NO: 317) |
| | polyT | | |
| sgRNA | sgRNA V1 | GUCUUGGAGUAUUGUGAgaaa | AACAGACUUCGGUCUG (SEQ ID |
| Versions | | UCACAACACGAGUCAAGAUA | NO: 318) |
| | | AAGAUUUAUCCUAACCGGUA | |
| | | CUUGUACCUGCCCUGUAGGG | |
| | | GGCUUUUUU (SEQ ID NO: 305) | |
| | sgRNA V2 | Not listed | GUUACAGGACCCUGUUGAUgaaa |
| | | | GUUUACAGGUUUCUGUAAUAAG |
| | | | GCAUAAUGCCUUAGGUUUGAUC |
| | | | UAACCAUAAAGAUCAAAACAGA |
| | | | CUUCGGUCUGUUUUUU (SEQ ID |
| | | | NO: 319) |
| | | OMNI-152 with sgRNA 5 | OMNI-153 with sgRNA 6 |
| crRNA: | crRNA | GUUGUGAAUUGCUUCGA (SEQ | GUUAUAGUUGACCGU (SEQ ID |
| tracrRNA | (Repeat) | ID NO: 320) | NO: 334) |
| duplex V1 | Partial | GUUACAGUAGCCUUA (SEQ ID | GUUAUAGUUGACCGU (SEQ ID |
| | crRNA 1 | NO: 321) | NO: 335) |
| | Partial | GUUACAGUAGCC (SEQ ID NO: | GUUAUAGUUGAC (SEQ ID NO: |
| | crRNA 2 | 322) | 336) |
| | Partial | GUUACAGUAG (SEQ ID NO: | GUUAUAGUUG (SEQ ID NO: 337) |
| | crRNA 3 | 323) | |
| | tracrRNA | GUAAGCUACUGUAAU (SEQ ID | ACGGUCAACACAUAUAUAAU |
| | (Antirepeat) | NO: 324) | (SEQ ID NO: 338) |
| | Partial | UAAGCUACUGUAAUA (SEQ ID | ACGGUCAACACAUAUAUAAUA |
| | tracrRNA 1 | NO: 325) | (SEQ ID NO: 339) |
| | Partial | GCUACUGUAAUA (SEQ ID NO: | GUCAACACAUAUAUAAUA (SEQ |
| | tracrRNA 2 | 326) | ID NO: 340) |
| | Partial | CUACUGUAAUA (SEQ ID NO: | CAACACAUAUAUAAUA (SEQ ID |
| | tracrRNA 3 | 327) | NO: 341) |
| TracrRNA | tracrRNA | AAGUGCAAUCGCA (SEQ ID | AAGGCUGAAAAUGCCGU (SEQ ID |
| sequences | Portion 1 | NO: 328) | NO: 342) |
| | tracrRNA | UGCAAUCGCA (SEQ ID NO: | GGCUGAAAAUGCC (SEQ ID NO: |
| | Portion 1- | 329) | 343) |
| | partial | | |
| | tracrRNA | AGGCUCUGUUCUUGAACAUC | AAGAUGAGGGGGCGACUUUAGU |
| | Portion 2 | CUUUAUUAAU (SEQ ID NO: | UACCCCCAUUAUUUUUU (SEQ ID |
| | | 330) | NO: 344) |
| | tracrRNA | Not listed | AAGAUGAGGGGGCGACUUUAGU |
| | Portion 2- | | UACCCCCAUUA (SEQ ID NO: 345) |
| | polyT | | |
| | tracrRNA | AACUCCAGCCAAAGGUCUGG | Not listed |
| | Portion 3 | AGUUUUUU (SEQ ID NO: 331) | |
| | tracrRNA | AACUCCAGCCAAAGGUCUGG | Not listed |
| | Portion 3- | AG (SEQ ID NO: 332) | |
| | polyT | | |
| sgRNA | sgRNA V1 | GUUACAGUAGCCUUACgaaaGU | GUUAUAGUUGACCGUgaaaACGG |
| Versions | | AAGCUACUGUAAUAAGUGCA | UCAACACAUAUAUAAUAAGGCU |
| | | AUCGCAAGGCUCUGUUCUUG | GAAAAUGCCGUAAGAUGAGGGG |
| | | AACAUCCUUUAUUAAUAACU | GCGACUUUAGUUACCCCCAUUA |
| | | CCAGCCAAAGGUCUGGAGUU | UUUUUU (SEQ ID NO: 346) |
| | | UUUU (SEQ ID NO: 333) | |
| | | OMNI-154 or OMNI-155 with | |
| | | sgRNA 7 | OMNI-156 with sgRNA 8 |
| crRNA: | crRNA | GUUGCGGCUAGACAUC (SEQ | GUUGCGGCUAGACAUC (SEQ ID |
| tracrRNA | (Repeat) | ID NO: 347) | NO: 359) |
| duplex V1 | Partial | GUUGCGGCUAGACAU (SEQ ID | GUUGCGGCUAGACAU (SEQ ID |
| | crRNA 1 | NO: 348) | NO: 360) |
| | Partial | GUUGCGGCUAGA (SEQ ID NO: | GUUGCGGCUAGA (SEQ ID NO: |
| | crRNA 2 | 349) | 361) |
| | Partial | GUUGCGGCUA (SEQ ID NO: | GUUGCGGCUA (SEQ ID NO: 362) |
| | crRNA 3 | 350) | |
| | tracrRNA | GAUGUCUAGUCGU (SEQ ID | GAUGUCUAGUCGU (SEQ ID NO: |
| | (Antirepeat) | NO: 351) | 363) |
| | Partial | AUGUCUAGUCGUU (SEQ ID | AUGUCUAGUCGUU (SEQ ID NO: |
| | tracrRNA 1 | NO: 352) | 364) |
| | Partial | UCUAGUCGUU (SEQ ID NO: | UCUAGUCGUU (SEQ ID NO: 365) |
| | tracrRNA 2 | 353) | |
| | Partial | UAGUCGUU | UAGUCGUU |
| | tracrRNA 3 | | |
| TracrRNA | tracrRNA | UAAUAAGAACCUCUUGCAAG | UAAUAAGAACCUUUCAUACGAA |
| sequences | Portion 1 | AGAGGAGAUUUCACCAUUAA | AGGAUAUUUCACCAUA (SEQ ID |
| | | (SEQ ID NO: 354) | NO: 366) |
| | tracrRNA | CCUCUUGCAAGAGAGG (SEQ | CCUUUCAUACGAAAGG (SEQ ID |
| | Portion 1- | ID NO: 355) | NO: 367) |
| | partial | | |
| | tracrRNA | AAACGGACACUUCGGUGUCC | AAAAAACAGGCACUUUGGUGCC |
| | Portion 2 | GUUUAUUUUUU (SEQ ID NO: | UGUUUUUU (SEQ ID NO: 368) |
| | | 356) | |
| | tracrRNA | AAACGGACACUUCGGUGUCC | AAAAAACAGGCACUUUGGUGCC |
| | Portion 2- | GUUUA (SEQ ID NO: 357) | UG (SEQ ID NO: 369) |
| | polyT | | |
| sgRNA | sgRNA V1 | GUUGCGGCUAGACAUCgaaaGA | GUUGCGGCUAGACAUCgaaaGAU |
| Versions | | UGUCUAGUCGUUAAUAAGAA | GUCUAGUCGUUAAUAAGAACCU |
| | | CCUCUUGCAAGAGAGGAGAU | UUCAUACGAAAGGAUAUUUCAC |
| | | UUCACCAUUAAAAACGGACA | CAUAAAAAAACAGGCACUUUGG |
| | | CUUCGGUGUCCGUUUAUUUU | UGCCUGUUUUUU (SEQ ID NO: |
| | | UU (SEQ ID NO: 358) | 370) |
| | | OMNI-157 with sgRNA 9 | OMNI-158 with sgRNA 10 |
| crRNA: | crRNA | GUUGCGGUUUGA (SEQ ID NO: | GUUGUAGAUUGCUUUC (SEQ ID |
| tracrRNA | (Repeat) | 371) | NO: 384) |
| duplex V1 | Partial | GUUGCGGUUUGACAC (SEQ ID | GUUGUAGAUUGCUUU (SEQ ID |
| | crRNA 1 | NO: 372) | NO: 385) |
| | Partial | GUUGCGGUUUGA (SEQ ID NO: | GUUGUAGAUUGC (SEQ ID NO: |
| | crRNA 2 | 373) | 386) |
| | Partial | GUUGCGGUUU (SEQ ID NO: | GUUGUAGAUU (SEQ ID NO: 387) |
| | crRNA 3 | 374) | |
| | tracrRNA | UUCUUUCCGCUAAC (SEQ ID | GAAAGCAAUCUACAAU (SEQ ID |
| | (Antirepeat) | NO: 375) | NO: 388) |
| | Partial | GUGUUCUUUCCGCUAACA | AAAGCAAUCUACAAUA (SEQ ID |
| | tracrRNA 1 | (SEQ ID NO: 376) | NO: 389) |
| | Partial | UUCUUUCCGCUAACA (SEQ ID | GCAAUCUACAAUA (SEQ ID NO: |
| | tracrRNA 2 | NO: 377) | 390) |
| | Partial | UUUCCGCUAACA (SEQ ID NO: | AAUCUACAAUA (SEQ ID NO: 391) |
| | tracrRNA 3 | 378) | |
| TracrRNA | tracrRNA | AAGUGUCAAAGACACACAAA | AAAGAAAUACUCUGUGGGGCUC |
| sequences | Portion 1 | AUUC (SEQ ID NO: 379) | UGUUGGCAACAACAUCCUCUAU |
| | | | U (SEQ ID NO: 392) |
| | tracrRNA | GUGUCAAAGACAC (SEQ ID | Not listed |
| | Portion 1- | NO: 380) | |
| | partial | | |
| | tracrRNA | GGGGGUUGACCGCGCGUCGC | GCCCGCUUGUCGGGCUUUUUU |
| | Portion 2 | CCCCUUUCUUUUUU (SEQ ID | (SEQ ID NO: 393) |
| | | NO: 381) | |
| | tracrRNA | GGGGGUUGACCGCGCGUCGC | GCCCGCUUGUCGGGC (SEQ ID |
| | Portion 2- | CCCCUUUC (SEQ ID NO: 382) | NO: 394) |
| | polyT | | |
| sgRNA | sgRNA V1 | GUUGCGGUUUGAgaaaUUCUU | GUUGUAGAUUGCUUUCgaaaGAA |
| Versions | | UCCGCUAACAAGUGUCAAAG | AGCAAUCUACAAUAAAGAAAUA |
| | | ACACACAAAAUUCGGGGGUU | CUCUGUGGGGCUCUGUUGGCAA |
| | | GACCGCGCGUCGCCCCCUUUC | CAACAUCCUCUAUUGCCCGCUU |
| | | UUUUUU (SEQ ID NO: 383) | GUCGGGCUUUUUU (SEQ ID NO: |
| | | | 395) |
| | | OMNI-160 with sgRNA 11 | OMNI-161 with sgRNA 12 |
| crRNA: | crRNA | GUUGUGAAUAGCUCUC (SEQ | GUUGUGAAUAGCUUUC (SEQ ID |
| tracrRNA | (Repeat) | ID NO: 396) | NO: 410) |
| duplex V1 | Partial | GUUGUGAAUAGCUCU (SEQ ID | GUUGUGAAUAGCUUU (SEQ ID |
| | crRNA 1 | NO: 397) | NO: 411) |
| | Partial | GUUGUGAAUAGC (SEQ ID NO: | GUUGUGAAUAGC (SEQ ID NO: |
| | crRNA 2 | 398) | 412) |
| | Partial | GUUGUGAAUA (SEQ ID NO: | GUUGUGAAUA (SEQ ID NO: 413) |
| | crRNA 3 | 399) | |
| | tracrRNA | GAAGCUAUUCACAAU (SEQ ID | AAAGCUAUUCACAAU (SEQ ID |
| | (Antirepeat) | NO: 400) | NO: 414) |
| | Partial | AAGCUAUUCACAAUA (SEQ ID | AAAGCUAUUCACAAUA (SEQ ID |
| | tracrRNA 1 | NO: 401) | NO: 415) |
| | Partial | GCUAUUCACAAUA (SEQ ID | GCUAUUCACAAUA (SEQ ID NO: |
| | tracrRNA 2 | NO: 402) | 416) |
| | Partial | UAUUCACAAUA (SEQ ID NO: | UAUUCACAAUA (SEQ ID NO: 417) |
| | tracrRNA 3 | 403) | |
| TracrRNA | tracrRNA | AAGGAUUAUUCCGU (SEQ ID | AAGGAUUAUUCCGU (SEQ ID NO: |
| sequences | Portion 1 | NO: 404) | 418) |
| | tracrRNA | GGAUUAUUCC (SEQ ID NO: | GGAUUAUUCC (SEQ ID NO: 419) |
| | Portion 1- | 405) | |
| | partial | | |
| | tracrRNA | UGUGAAAACAUU (SEQ ID NO: | UGUGUAAACAUUCC (SEQ ID NO: |
| | Portion 2 | 406) | 420) |
| | tracrRNA | AGGUUGGUCCAUCGUCCUAC | GAGUGGGGCAGCAAUGUCUCGC |
| | Portion 3 | AACGGUGGACAAUUUUUU | UCUUUUUU (SEQ ID NO: 421) |
| | | (SEQ ID NO: 407) | |
| | tracrRNA | AGGUUGGUCCAUCGUCCUAC | GAGUGGGGCAGCAAUGUCUCGC |
| | Portion 3- | AACGGUGGACAA (SEQ ID NO: | UC (SEQ ID NO: 422) |
| | polyT | 408) | |
| sgRNA | sgRNA V1 | GUUGUGAAUAGCUCUCgaaaGA | GUUGUGAAUAGCUUUCgaaaAAA |
| Versions | | AGCUAUUCACAAUAAGGAUU | GCUAUUCACAAUAAGGAUUAUU |
| | | AUUCCGUUGUGAAAACAUUA | CCGUUGUGUAAACAUUCCGAGU |
| | | GGUUGGUCCAUCGUCCUACA | GGGGCAGCAAUGUCUCGCUCUU |
| | | ACGGUGGACAAUUUUUU (SEQ | UUUU (SEQ ID NO: 423) |
| | | ID NO: 409) | |
| | | OMNI-162 with sgRNA 13 | OMNI-163 with sgRNA 14 |
| crRNA: | crRNA | GUUGUGAAUUGCUAAAAAU | GUUGUGAAUUGCUUCG (SEQ ID |
| tracrRNA | (Repeat) | (SEQ ID NO: 424) | NO: 443) |
| duplex V1 | Partial | GUUGUGAAUUGCUAA (SEQ ID | GUUGUGAAUUGCUUC (SEQ ID |
| | crRNA 1 | NO: 425) | NO: 444) |
| | Partial | GUUGUGAAUUGC (SEQ ID NO: | GUUGUGAAUUGC (SEQ ID NO: |
| | crRNA 2 | 426) | 445) |
| | Partial | GUUGUGAAUU (SEQ ID NO: | GUUGUGAAUU (SEQ ID NO: 446) |
| | crRNA 3 | 427) | |
| | tracrRNA | AGUGAAAGACUUUUCACAAC | CGAAAGCAAUUCACAAU (SEQ ID |
| | (Antirepeat) | (SEQ ID NO: 428) | NO: 447) |
| | Partial | AAAGACUUUUCACAACA (SEQ | GAAAGCAAUUCACAAUA (SEQ ID |
| | tracrRNA 1 | ID NO: 429) | NO: 448) |
| | Partial | GACUUUUCACAACA (SEQ ID | GCAAUUCACAAUA (SEQ ID NO: |
| | tracrRNA 2 | NO: 430) | 449) |
| | Partial | UUUUCACAACA (SEQ ID NO: | AAUUCACAAUA (SEQ ID NO: 450) |
| | tracrRNA 3 | 431) | |
| TracrRNA | tracrRNA | AAGGCUAUAAGCCGAAGACU | AAGGAUUAUUCCGU (SEQ ID NO: |
| sequences | Portion 1 | UCUU (SEQ ID NO: 432) | 451) |
| | tracrRNA | GGCUAUAAGCC (SEQ ID NO: | GGAUUAUUCC (SEQ ID NO: 452) |
| | Portion 1- | 433) | |
| | partial | | |
| | tracrRNA | ACUCCUGCGUACUCCGUAGG | UGUGAAAACAUUAGGUUA (SEQ |
| | Portion 2 | AGUUUUUU (SEQ ID NO: 434) | ID NO: 453) |
| | tracrRNA | ACUCCUGCGUACUCCGUAGG | Not listed |
| | Portion 2- | AG (SEQ ID NO: 435) | |
| | polyT | | |
| | tracrRNA | Not listed | GCCCAUCGUCCUUCAACGGUGG |
| | Portion 3 | | GCAUUUUUU (SEQ ID NO: 454) |
| | tracrRNA | Not listed | GCCCAUCGUCCUUCAACGGUGG |
| | Portion 3- | | GCA (SEQ ID NO: 455) |
| | polyT | | |
| sgRNA | sgRNA V1 | GUUGUGAAUUGCUAAAAAUga | GUUGUGAAUUGCUUCGgaaaCGA |
| Versions | | aaAGUGAAAGACUUUUCACAA | AAGCAAUUCACAAUAAGGAUUA |
| | | CAAGGCUAUAAGCCGAAGAC | UUCCGUUGUGAAAACAUUAGGU |
| | | UUCUUACUCCUGCGUACUCC | UAGCCCAUCGUCCUUCAACGGU |
| | | GUAGGAGUUUUUU (SEQ ID | GGGCAUUUUUU (SEQ ID NO: 456) |
| | | NO: 436) | |
| | sgRNA V2 | GCUUGAUAGUAUUGUAAgaaa | GUUGUGAAUUGCUUCGAgaaaUC |
| | | UUACAAUACGAGUUCAAGUA | GAAAGCAAUUCACAAUAAGGAU |
| | | AACUUUAGUCCAAAUGAGCU | UAUUCCGUUGUGAAAACAUUAG |
| | | CGUGCUCGCCUGCGUUGGCA | GUUAGCCCAUCGUCCUUCAACG |
| | | GGCUUUUUU (SEQ ID NO: 437) | GUGGGCAUUUUUU (SEQ ID NO: |
| | | | 457) |
| | sgRNA V2 | GCUUGAUAGUAUUGUAA (SEQ | GUUGUGAAUUGCUUCGA (SEQ ID |
| | crRNA | ID NO: 438) | NO: 458) |
| | (Repeat) | | |
| | sgRNA V2 | UUACAAUACGAGUUCAAGU | UCGAAAGCAAUUCACAAU (SEQ |
| | tracrRNA | (SEQ ID NO: 439) | ID NO: 459) |
| | (Antirepeat) | | |
| | sgRNA V2 | AAACUUUAGUCCAAAUGAGC | Not listed |
| | Modified | UCGUGCUC (SEQ ID NO: 440) | |
| | Portion 1 | | |
| | sgRNA V2 | GCCUGCGUUGGCAGGCUUUU | Not listed |
| | Modified | UU (SEQ ID NO: 441) | |
| | Portion 2 | | |
| Other optimizations- | | GCCUGCGUUGGCAGGC (SEQ | Not listed |
| modified tracrRNA | | ID NO: 442) | |
| Portion-polyT | | | |
| | | OMNI-164 with sgRNA 15 | OMNI-165 with sgRNA 16 |
| crRNA: | crRNA | GUUGUGAAUUGCUUGA (SEQ | GUUGUGAAUUGCUUUC (SEQ ID |
| tracrRNA | (Repeat) | ID NO: 460) | NO: 474) |
| duplex V1 | Partial | GUUGUGAAUUGCUUG (SEQ ID | GUUGUGAAUUGCUUU (SEQ ID |
| | crRNA 1 | NO: 461) | NO: 475) |
| | Partial | GUUGUGAAUUGC (SEQ ID NO: | GUUGUGAAUUGC (SEQ ID NO: |
| | crRNA 2 | 462) | 476) |
| | Partial | GUUGUGAAUU (SEQ ID NO: | GUUGUGAAUU (SEQ ID NO: 477) |
| | crRNA 3 | 463) | |
| | tracrRNA | UCAAGCAAUUCACAAU (SEQ | GAAAGCAAUUCACAAU (SEQ ID |
| | (Antirepeat) | ID NO: 464) | NO: 478) |
| | Partial | CAAGCAAUUCACAAUA (SEQ | AAAGCAAUUCACAAUA (SEQ ID |
| | tracrRNA 1 | ID NO: 465) | NO: 479) |
| | Partial | GCAAUUCACAAUA (SEQ ID | GCAAUUCACAAUA (SEQ ID NO: |
| | tracrRNA 2 | NO: 466) | 480) |
| | Partial | AAUUCACAAUA (SEQ ID NO: | AAUUCACAAUA (SEQ ID NO: 481) |
| | tracrRNA 3 | 467) | |
| TracrRNA | tracrRNA | AAGGAUUAUUCC (SEQ ID NO: | AAGGAUUAUUCCGU (SEQ ID NO: |
| sequences | Portion 1 | 468) | 482) |
| | tracrRNA | GGAUUAUUCC (SEQ ID NO: | GGAUUAUUCC (SEQ ID NO: 483) |
| | Portion 1- | 469) | |
| | partial | | |
| | tracrRNA | GUUGUGAAAACUACU (SEQ ID | UGUGAAAACAUUU (SEQ ID NO: |
| | Portion 2 | NO: 470) | 484) |
| | tracrRNA | GAGGGGGCGGAAGAUAUCUU | GGAGCGGGGAUAGCGAUAUCCU |
| | Portion 3 | CUUCCGUCGCCUUUUUU (SEQ | CGCUUUCUUUUUU (SEQ ID NO: |
| | | ID NO: 471) | 485) |
| | tracrRNA | GAGGGGGCGGAAGAUAUCUU | GGAGCGGGGAUAGCGAUAUCCU |
| | Portion 3- | CUUCCGUCGCC (SEQ ID NO: | CGCUUUC (SEQ ID NO: 486) |
| | polyT | 472) | |
| sgRNA | sgRNA V1 | GUUGUGAAUUGCUUGAgaaaU | GUUGUGAAUUGCUUUCgaaaGAA |
| Versions | | CAAGCAAUUCACAAUAAGGA | AGCAAUUCACAAUAAGGAUUAU |
| | | UUAUUCCGUUGUGAAAACUA | UCCGUUGUGAAAACAUUUGGAG |
| | | CUGAGGGGGCGGAAGAUAUC | CGGGGAUAGCGAUAUCCUCGCU |
| | | UUCUUCCGUCGCCUUUUUU | UUCUUUUUU (SEQ ID NO: 487) |
| | | (SEQ ID NO: 473) | |
| | | OMNI-167 with sgRNA 17 | OMNI-168 with sgRNA 18 |
| crRNA: | crRNA | GUUGUGAAUUGCUUUC (SEQ | GUUGUGAAUUGCUUUC (SEQ ID |
| tracrRNA | (Repeat) | ID NO: 488) | NO: 502) |
| duplex V1 | Partial | GUUGUGAAUUGCUUU (SEQ ID | GUUGUGAAUUGCUUU (SEQ ID |
| | crRNA 1 | NO: 489) | NO: 503) |
| | Partial | GUUGUGAAUUGC (SEQ ID NO: | GUUGUGAAUUGC (SEQ ID NO: |
| | crRNA 2 | 490) | 504) |
| | Partial | GUUGUGAAUU (SEQ ID NO: | GUUGUGAAUU (SEQ ID NO: 505) |
| | crRNA 3 | 491) | |
| | tracrRNA | GAAGCAAUUCACAAU (SEQ ID | GAAGCAAUUCACAAU (SEQ ID |
| | (Antirepeat) | NO: 492) | NO: 506) |
| | Partial | AAGCAAUUCACAAUA (SEQ ID | AAGCAAUUCACAAUA (SEQ ID |
| | tracrRNA 1 | NO: 493) | NO: 507) |
| | Partial | GCAAUUCACAAUA (SEQ ID | GCAAUUCACAAUA (SEQ ID NO: |
| | tracrRNA 2 | NO: 494) | 508) |
| | Partial | AAUUCACAAUA (SEQ ID NO: | AAUUCACAAUA (SEQ ID NO: 509) |
| | tracrRNA 3 | 495) | |
| TracrRNA | tracrRNA | AAGGAUUAUUCCGU (SEQ ID | AAGGAUUAUUCCGU (SEQ ID NO: |
| sequences | Portion 1 | NO: 496) | 510) |
| | tracrRNA | GGAUUAUUCC (SEQ ID NO: | GGAUUAUUCCGU (SEQ ID NO: |
| | Portion 1- | 497) | 511) |
| | partial | | |
| | tracrRNA | UGUGAAAACAUUAAGGCC | UGUGAAAACAUCAAGGUU (SEQ |
| | Portion 2 | (SEQ ID NO: 498) | ID NO: 512) |
| | tracrRNA | GCCCUCGUCCUCAACGGGGGC | GCCCUCGUCCUUAACGGGGGCU |
| | Portion 3 | UCUUUUUU (SEQ ID NO: 499) | UUUUU (SEQ ID NO: 513) |
| | tracrRNA | GCCCUCGUCCUCAACGGGGGC | GCCCUCGUCCUUAACGGGGGC |
| | Portion 3- | UC (SEQ ID NO: 500) | (SEQ ID NO: 514) |
| | polyT | | |
| sgRNA | sgRNA V1 | GUUGUGAAUUGCUUUCgaaaG | GUUGUGAAUUGCUUUCgaaaGAA |
| Versions | | AAGCAAUUCACAAUAAGGAU | GCAAUUCACAAUAAGGAUUAUU |
| | | UAUUCCGUUGUGAAAACAUU | CCGUUGUGAAAACAUCAAGGUU |
| | | AAGGCCGCCCUCGUCCUCAAC | GCCCUCGUCCUUAACGGGGGCU |
| | | GGGGGCUCUUUUUU (SEQ ID | UUUUU (SEQ ID NO: 515) |
| | | NO: 501) | |
| | | OMNI-169 with sgRNA 19 | OMNI-170 with sgRNA 20 |
| crRNA: | crRNA | GUUGUGAAUUGCUUUCAAA | GUUGUGAAUUGCUUUCAAA |
| tracrRNA | (Repeat) | (SEQ ID NO: 516) | (SEQ ID NO: 532) |
| duplex V1 | Partial | GUUGUGAAUUGCUUU (SEQ ID | GUUGUGAAUUGCUUU (SEQ ID |
| | crRNA 1 | NO: 517) | NO: 533) |
| | Partial | GUUGUGAAUUGC (SEQ ID NO: | GUUGUGAAUUGC (SEQ ID NO: |
| | crRNA 2 | 518) | 534) |
| | Partial | GUUGUGAAUU (SEQ ID NO: | GUUGUGAAUU (SEQ ID NO: 535) |
| | crRNA 3 | 519) | |
| | tracrRNA | UGUGAAAGCUUUUCACAAU | UGUGAAAGCUUUUCACAAU |
| | (Antirepeat) | (SEQ ID NO: 520) | (SEQ ID NO: 536) |
| | Partial | AAAGCUUUUCACAAUA (SEQ | AAAGCUUUUCACAAUA (SEQ ID |
| | tracrRNA 1 | ID NO: 521) | NO: 537) |
| | Partial | GCUUUUCACAAUA (SEQ ID | GCUUUUCACAAUA (SEQ ID NO: |
| | tracrRNA 2 | NO: 522) | 538) |
| | Partial | UUUUCACAAUA (SEQ ID NO: | UUUUCACAAUA (SEQ ID NO: 539) |
| | tracrRNA 3 | 523) | |
| TracrRNA | tracrRNA | AAGGCUAUAAGCCAC (SEQ ID | AAGGCUAUAAGCC (SEQ ID NO: |
| sequences | Portion 1 | NO: 524) | 540) |
| | tracrRNA | GGCUAUAAGCC (SEQ ID NO: | GGCUAUAAGCC (SEQ ID NO: 541) |
| | Portion 1- | 525) | |
| | partial | | |
| | tracrRNA | AGAUCUUUCUA (SEQ ID NO: | GAAGAUUUUCUAUCUCCCGCGU |
| | Portion 2 | 526) | ACUUUCCGUGGGAGAAAUUUUU |
| | | | U (SEQ ID NO: 542) |
| | tracrRNA | Not listed | GAAGAUUUUCUAUCUCCCGCGU |
| | Portion 2- | | ACUUUCCGUGGGAGAAA (SEQ ID |
| | polyT | | NO: 543) |
| | tracrRNA | ACUCCUGCGUACUCCGUGGG | Not listed |
| | Portion 3 | AGUAUUUUUU (SEQ ID NO: | |
| | | 527) | |
| | tracrRNA | ACUCCUGCGUACUCCGUGGG | Not listed |
| | Portion 3- | AGUA (SEQ ID NO: 528) | |
| | polyT | | |
| sgRNA | sgRNA V1 | GUUGUGAAUUGCUUUCAAAga | GUUGUGAAUUGCUUUCAAAgaaa |
| Versions | | aaUGUGAAAGCUUUUCACAAU | UGUGAAAGCUUUUCACAAUAAG |
| | | AAGGCUAUAAGCCACAGAUC | GCUAUAAGCCGAAGAUUUUCUA |
| | | UUUCUAACUCCUGCGUACUC | UCUCCCGCGUACUUUCCGUGGG |
| | | CGUGGGAGUAUUUUUU (SEQ | AGAAAUUUUUU (SEQ ID NO: 544) |
| | | ID NO: 529) | |
| | sgRNA V2 | GUUGUGAAUUGCUUUCAAAga | GUUGUGAAUUGCUUUCAAAgaaa |
| | | aaUGUGAAAGCUCUUCACAAU | UGUGAAAGCUCUUCACAAUAAG |
| | | AAGGCUAUAAGCCACAGAUC | GCUAUAAGCCGAAGAUUCUCUA |
| | | UUUCUAACUCCUGCGUACUC | UCUCCCGCGUACUUUCCGUGGG |
| | | CGUGGGAGUAUUUUUU (SEQ | AGAAAUUUUUU (SEQ ID NO: 545) |
| | | ID NO: 530) | |
| | sgRNA V2 | UGUGAAAGCUCUUCACAAU | UGUGAAAGCUCUUCACAAU (SEQ |
| | tracrRNA | (SEQ ID NO: 531) | ID NO: 546) |
| | (Antirepeat) | | |
| | | OMNI-171, 172, 173, 174, or | |
| | | 175 with sgRNA 21 | OMNI-176 with sgRNA 22 |
| crRNA: | crRNA | GUUGUGAAUUGCUUUC (SEQ | GUUGUGAAUUGCUUUCA (SEQ ID |
| tracrRNA | (Repeat) | ID NO: 547) | NO: 561) |
| duplex V1 | Partial | GUUGUGAAUUGCUUU (SEQ ID | GUUGUGAAUUGCUUU (SEQ ID |
| | crRNA 1 | NO: 548) | NO: 562) |
| | Partial | GUUGUGAAUUGC (SEQ ID NO: | GUUGUGAAUUGC (SEQ ID NO: |
| | crRNA 2 | 549) | 563) |
| | Partial | GUUGUGAAUU (SEQ ID NO: | GUUGUGAAUU (SEQ ID NO: 564) |
| | crRNA 3 | 550) | |
| | tracrRNA | GAAAGCAAUUCACAAU (SEQ | UGAAGCAAUUCACAAU (SEQ ID |
| | (Antirepeat) | ID NO: 551) | NO: 565) |
| | Partial | AAAGCAAUUCACAAUA (SEQ | AAGCAAUUCACAAUA (SEQ ID |
| | tracrRNA 1 | ID NO: 552) | NO: 566) |
| | Partial | GCAAUUCACAAUA (SEQ ID | GCAAUUCACAAUA (SEQ ID NO: |
| | tracrRNA 2 | NO: 553) | 567) |
| | Partial | AAUUCACAAUA (SEQ ID NO: | AAUUCACAAUA (SEQ ID NO: 568) |
| | tracrRNA 3 | 554) | |
| TracrRNA | tracrRNA | AAGGAUUAUUCC (SEQ ID NO: | AAGGAUUAUUCCGUUGU (SEQ ID |
| sequences | Portion 1 | 555) | NO: 569) |
| | tracrRNA | GGAUUAUUCC (SEQ ID NO: | GGAUUAUUCC (SEQ ID NO: 570) |
| | Portion 1- | 556) | |
| | partial | | |
| | tracrRNA | GUUGUGAAAACUCUUAGGUU | GAAAACAUUAAAAGCGGCACUC |
| | Portion 2 | CU (SEQ ID NO: 557) | UUUCGGGUGUCGCUUUCGUUUU |
| | | | UU (SEQ ID NO: 571) |
| | tracrRNA | Not listed | GAAAACAUUAAAAGCGGCACUC |
| | Portion 2- | | UUUCGGGUGUCGCUUUCG (SEQ |
| | polyT | | ID NO: 572) |
| | tracrRNA | AGUCUGUCGUCCUUUAUCGG | Not listed |
| | Portion 3 | CAGACUUUUUU (SEQ ID NO: | |
| | | 558) | |
| | tracrRNA | AGUCUGUCGUCCUUUAUCGG | Not listed |
| | Portion 3- | CAGAC (SEQ ID NO: 559) | |
| | polyT | | |
| sgRNA | sgRNA V1 | GUUGUGAAUUGCUUUCgaaaG | GUUGUGAAUUGCUUUCAgaaaUG |
| Versions | | AAAGCAAUUCACAAUAAGGA | AAGCAAUUCACAAUAAGGAUUA |
| | | UUAUUCCGUUGUGAAAACUC | UUCCGUUGUGAAAACAUUAAAA |
| | | UUAGGUUCUAGUCUGUCGUC | GCGGCACUCUUUCGGGUGUCGC |
| | | CUUUAUCGGCAGACUUUUUU | UUUCGUUUUUU (SEQ ID NO: 573) |
| | | (SEQ ID NO: 560) | |
| | sgRNA V2 | Not listed | GUUGUGAAUUGCUUUCgaaaGAA |
| | | | GCAAUUCACAAUAAGGAUUAUU |
| | | | CCGUUGUGAAAACAUUAAAAGC |
| | | | GGCACUCUUUCGGGUGUCGCUU |
| | | | UCGUUUUUU (SEQ ID NO: 574) |
| | sgRNA V2 | Not listed | GUUGUGAAUUGCUUUC (SEQ ID |
| | crRNA | | NO: 575) |
| | (Repeat) | | |
| | sgRNA V2 | Not listed | GAAGCAAUUCACAAU (SEQ ID |
| | tracrRNA | | NO: 576) |
| | (Antirepeat) | | |
| | | | OMNI-180 or OMNI-181 with |
| | | OMNI-177 with sgRNA 23 | sgRNA 24 |
| crRNA: | crRNA | GUUGUGAAUUGCUUUC (SEQ | GUUGUGAAUUGCUUUC (SEQ ID |
| tracrRNA | (Repeat) | ID NO: 577) | NO: 591) |
| duplex V1 | Partial | GUUGUGAAUUGCUUU (SEQ ID | GUUGUGAAUUGCUUU (SEQ ID |
| | crRNA 1 | NO: 578) | NO: 592) |
| | Partial | GUUGUGAAUUGC (SEQ ID NO: | GUUGUGAAUUGC (SEQ ID NO: |
| | crRNA 2 | 579) | 593) |
| | Partial | GUUGUGAAUU (SEQ ID NO: | GUUGUGAAUU (SEQ ID NO: 594) |
| | crRNA 3 | 580) | |
| | tracrRNA | GAAGCAAUUCACAAU (SEQ ID | GAAGCAAUUCACAAU (SEQ ID |
| | (Antirepeat) | NO: 581) | NO: 595) |
| | Partial | AAGCAAUUCACAAUA (SEQ ID | GAAGCAAUUCACAAUA (SEQ ID |
| | tracrRNA 1 | NO: 582) | NO: 596) |
| | Partial | GCAAUUCACAAUA (SEQ ID | GCAAUUCACAAUA (SEQ ID NO: |
| | tracrRNA 2 | NO: 583) | 597) |
| | Partial | AAUUCACAAUA (SEQ ID NO: | AAUUCACAAUA (SEQ ID NO: 598) |
| | tracrRNA 3 | 584) | |
| TracrRNA | tracrRNA | AAGGAUUAUUCCGU (SEQ ID | AAGGAUUAUUCCGU (SEQ ID NO: |
| sequences | Portion 1 | NO: 585) | 599) |
| | tracrRNA | GGAUUAUUCC (SEQ ID NO: | GGAUUAUUCC (SEQ ID NO: 600) |
| | Portion 1- | 586) | |
| | partial | | |
| | tracrRNA | UGUGAAAACAUUAGGUU (SEQ | UGUGUAAACAUUU (SEQ ID NO: |
| | Portion 2 | ID NO: 587) | 601) |
| | tracrRNA | GCCAUCGUCCUUAACGGUGG | AGAGCGGAUCGGAAGAUUCGCU |
| | Portion 3 | CUUUUUU (SEQ ID NO: 588) | CUUUUUU (SEQ ID NO: 602) |
| | tracrRNA | GCCAUCGUCCUUAACGGUGG | AGAGCGGAUCGGAAGAUUCGCU |
| | Portion 3- | C (SEQ ID NO: 589) | C (SEQ ID NO: 603) |
| | polyT | | |
| sgRNA | sgRNA V1 | GUUGUGAAUUGCUUUCgaaaG | GUUGUGAAUUGCUUUCgaaaGAA |
| Versions | | AAGCAAUUCACAAUAAGGAU | GCAAUUCACAAUAAGGAUUAUU |
| | | UAUUCCGUUGUGAAAACAUU | CCGUUGUGUAAACAUUUAGAGC |
| | | AGGUUGCCAUCGUCCUUAAC | GGAUCGGAAGAUUCGCUCUUUU |
| | | GGUGGCUUUUUU (SEQ ID NO: | UU (SEQ ID NO: 604) |
| | | 590) | |
| | | OMNI-180 or OMNI-181 with | |
| | | sgRNA 25 | OMNI-182 with sgRNA 26 |
| crRNA: | crRNA | GUUGUGAAUUGCUUUC (SEQ | GUUGUGAGUUGCUUUC (SEQ ID |
| tracrRNA | (Repeat) | ID NO: 605) | NO: 619) |
| duplex V1 | Partial | GUUGUGAAUUGCUUU (SEQ ID | GUUGUGAGUUGCUUU (SEQ ID |
| | crRNA 1 | NO: 606) | NO: 620) |
| | Partial | GUUGUGAAUUGC (SEQ ID NO: | GUUGUGAGUUGC (SEQ ID NO: |
| | crRNA 2 | 607) | 621) |
| | Partial | GUUGUGAAUU (SEQ ID NO: | GUUGUGAGUU (SEQ ID NO: 622) |
| | crRNA 3 | 608) | |
| | tracrRNA | GAAGCAAUUCACAAU (SEQ ID | GAAGCAACUCACAAU (SEQ ID |
| | (Antirepeat) | NO: 609) | NO: 623) |
| | Partial | GAAGCAAUUCACAAUA (SEQ | AAGCAACUCACAAUA (SEQ ID |
| | tracrRNA 1 | ID NO: 610) | NO: 624) |
| | Partial | GCAAUUCACAAUA (SEQ ID | GCAACUCACAAUA (SEQ ID NO: |
| | tracrRNA 2 | NO: 611) | 625) |
| | Partial | AAUUCACAAUA (SEQ ID NO: | AACUCACAAUA (SEQ ID NO: 626) |
| | tracrRNA 3 | 612) | |
| TracrRNA | tracrRNA | AAGGAUUAUUCCGU (SEQ ID | AAGGAUUUUCUUCCGUUGUGAG |
| sequences | Portion 1 | NO: 613) | AACAUCCACU (SEQ ID NO: 627) |
| | tracrRNA | GGAUUAUUCC (SEQ ID NO: | GGAUUUUCUUCC (SEQ ID NO: |
| | Portion 1- | 614) | 628) |
| | partial | | |
| | tracrRNA | UGUGCAAACAUUU (SEQ ID | GGGGGGCGGCAACGCCUCCCUU |
| | Portion 2 | NO: 615) | UCUUUAUUUCUCCGCUCAUCUU |
| | | | GAUUUUUU (SEQ ID NO: 629) |
| | tracrRNA | Not listed | GGGGGGCGGCAACGCCUCCCUU |
| | Portion 2- | | UCUUUAUUUCUCCGCUCAUCUU |
| | polyT | | GA (SEQ ID NO: 630) |
| | tracrRNA | AGAGCGGAUCGCAUGAUUCG | Not listed |
| | Portion 3 | CUCUUUUUU (SEQ ID NO: 616) | |
| | tracrRNA | AGAGCGGAUCGCAUGAUUCG | Not listed |
| | Portion 3- | CUC (SEQ ID NO: 617) | |
| | polyT | | |
| sgRNA | sgRNA V1 | GUUGUGAAUUGCUUUCgaaaG | GUUGUGAGUUGCUUUCgaaaGAA |
| Versions | | AAGCAAUUCACAAUAAGGAU | GCAACUCACAAUAAGGAUUUUC |
| | | UAUUCCGUUGUGCAAACAUU | UUCCGUUGUGAGAACAUCCACU |
| | | UAGAGCGGAUCGCAUGAUUC | GGGGGGCGGCAACGCCUCCCUU |
| | | GCUCUUUUUU (SEQ ID NO: | UCUUUAUUUCUCCGCUCAUCUU |
| | | 618) | GAUUUUUU (SEQ ID NO: 631) |
| | sgRNA V2 | Not listed | GUUGUGAGUUGCUUUCgaaaGAA |
| | | | GCAACUCACAAUAAGGAUCUUC |
| | | | UUCCGUUGUGAGAACAUCCACU |
| | | | GGGGGGCGGCAACGCCUCCCUU |
| | | | UCUUUAUUUCUCCGCUCAUCUU |
| | | | GAUUUUUU (SEQ ID NO: 632) |
| | sgRNA V2 | Not listed | AAGGAUCUUCUUCCGUUGUGAG |
| | Modified | | AACAUCCACU (SEQ ID NO: 633) |
| | tracrRNA | | |
| | Portion 1 | | |
| | | OMNI-183 with sgRNA 27 | OMNI-184 with sgRNA 28 |
| crRNA: | crRNA | GUUGUGAUUAGCAAAA | GUUGUGAUUAGCUGAA (SEQ |
| tracrRNA | (Repeat) | (SEQ ID NO: 634) | ID NO: 651) |
| duplex V1 | Partial | GUUGUGAUUAGCAAA (SEQ | GUUGUGAUUAGCUGA (SEQ ID |
| | crRNA 1 | ID NO: 635) | NO: 652) |
| | Partial | GUUGUGAUUAGC (SEQ ID | GUUGUGAUUAGC (SEQ ID NO: |
| | crRNA 2 | NO: 636) | 653) |
| | Partial | GUUGUGAUUA (SEQ ID NO: | GUUGUGAUUA (SEQ ID NO: |
| | crRNA 3 | 637) | 654) |
| | tracrRNA | UUUUGCUAAUCACAAU | UCAGCUAAUCACAAU (SEQ ID |
| | (Antirepeat) | (SEQ ID NO: 638) | NO: 655) |
| | Partial | UUUGCUAAUCACAAUA | CAGCUAAUCACAAUA (SEQ ID |
| | tracrRNA 1 | (SEQ ID NO: 639) | NO: 656) |
| | Partial | GCUAAUCACAAUA (SEQ ID | GCUAAUCACAAUA (SEQ ID |
| | tracrRNA 2 | NO: 640) | NO: 657) |
| | Partial | UAAUCACAAUA (SEQ ID | UAAUCACAAUA (SEQ ID NO: |
| | tracrRNA 3 | NO: 641) | 658) |
| TracrRNA | tracrRNA | AAGGAUUAUUCCGU (SEQ | AAGGAUUAUUCCGU (SEQ ID |
| sequences | Portion 1 | ID NO: 642) | NO: 659) |
| | tracrRNA | GGAUUAUUCC (SEQ ID NO: | GGAUUAUUCC (SEQ ID NO: |
| | Portion 1- | 643) | 660) |
| | partial | | |
| | tracrRNA | UGUGAAAACAUUUGA (SEQ | UGUGAAAACAUCUUU (SEQ ID |
| | Portion 2 | ID NO: 644) | NO: 661) |
| | tracrRNA | GGGCGGCGAAAGUCGCCC | GGGGGGGAAACUCGUCCUU |
| | Portion 3 | AUUUUUU (SEQ ID NO: 645) | UUUU (SEQ ID NO: 662) |
| | tracrRNA | GGGCGGCGAAAGUCGCCC | GGGCGGGGAAACUCGUCC |
| | Portion 3- | A (SEQ ID NO: 646) | (SEQ ID NO: 663) |
| | polyT | | |
| sgRNA | sgRNA V1 | GUUGUGAUUAGCAAAAgaaa | GUUGUGAUUAGCUGAAgaaaU |
| Versions | | UUUUGCUAAUCACAAUAA | CAGCUAAUCACAAUAAGGAU |
| | | GGAUUAUUCCGUUGUGAA | UAUUCCGUUGUGAAAACAUC |
| | | AACAUUUGAGGGCGGCGA | UUUGGGCGGGGAAACUCGUC |
| | | AAGUCGCCCAUUUUUU | CUUUUUU (SEQ ID NO: 664) |
| | | (SEQ ID NO: 647) | |
| | sgRNA V2 | GUUGUGAUUAGCAGAAgaaa | Not listed |
| | | UUCUGCUAAUCACAAUAA | |
| | | GGAUUAUUCCGUUGUGAA | |
| | | AACAUUUGAGGGCGGCGA | |
| | | AAGUCGCCCAUUUUUU | |
| | | (SEQ ID NO: 648) | |
| | sgRNA V2 | GUUGUGAUUAGCAGAA | Not listed |
| | crRNA | (SEQ ID NO: 649) | |
| | (Repeat) | | |
| | sgRNA V2 | UUCUGCUAAUCACAAU | Not listed |
| | tracrRNA | (SEQ ID NO: 650) | |
| | (Antirepeat) | | |
| | | OMNI-185 or OMNI-186 | OMNI-187 or OMNI-188 |
| | | with sgRNA 29 | with sgRNA 30 |
| crRNA: | crRNA | GUUGUGAUUAGCUGAA (SEQ | GUUGUGAUUAGCUGAA (SEQ ID |
| tracrRNA | (Repeat) | ID NO: 665) | NO: 677) |
| duplex V1 | Partial | GUUGUGAUUAGCUGA (SEQ ID | GUUGUGAUUAGCUGA (SEQ ID |
| | crRNA 1 | NO: 666) | NO: 678) |
| | Partial | GUUGUGAUUAGC (SEQ ID NO: | GUUGUGAUUAGC (SEQ ID NO: |
| | crRNA 2 | 667) | 679) |
| | Partial | GUUGUGAUUA (SEQ ID NO: | GUUGUGAUUA (SEQ ID NO: 680) |
| | crRNA 3 | 668) | |
| | tracrRNA | UUCAGCUAAUCACAAU (SEQ | UUCAGCUAAUCACAAU (SEQ ID |
| | (Antirepeat) | ID NO: 669) | NO: 681) |
| | Partial | UCAGCUAAUCACAAUA (SEQ | UCAGCUAAUCACAAUA (SEQ ID |
| | tracrRNA 1 | ID NO: 670) | NO: 682) |
| | Partial | GCUAAUCACAAUA (SEQ ID | GCUAAUCACAAUA (SEQ ID NO: |
| | tracrRNA 2 | NO: 671) | 683) |
| | Partial | UAAUCACAAUA (SEQ ID NO: | UAAUCACAAUA (SEQ ID NO: 684) |
| | tracrRNA 3 | 672) | |
| TracrRNA | tracrRNA | AAGGAUUAUUCCGUUGUGAA | AAGGAUUAUUCCGUUGUGAAAA |
| sequences | Portion 1 | AACAUUCGGAUC (SEQ ID NO: | CAUUCGGAUC (SEQ ID NO: 685) |
| | | 673) | |
| | tracrRNA | GCCCAUCAUCCUAAUGGUGG | GCCCAUCGUCCCCCAAGGUGGG |
| | Portion 2 | GCACUUUUUU (SEQ ID NO: | CAUUUUUU (SEQ ID NO: 686) |
| | | 674) | |
| | tracrRNA | GCCCAUCAUCCUAAUGGUGG | GCCCAUCGUCCCCCAAGGUGGG |
| | Portion 2- | GCAC (SEQ ID NO: 675) | CA (SEQ ID NO: 687) |
| | polyT | | |
| sgRNA | sgRNA V1 | GUUGUGAUUAGCUGAAgaaaU | GUUGUGAUUAGCUGAAgaaaUUC |
| Versions | | UCAGCUAAUCACAAUAAGGA | AGCUAAUCACAAUAAGGAUUAU |
| | | UUAUUCCGUUGUGAAAACAU | UCCGUUGUGAAAACAUUCGGAU |
| | | UCGGAUCGCCCAUCAUCCUA | CGCCCAUCGUCCCCCAAGGUGG |
| | | AUGGUGGGCACUUUUUU (SEQ | GCAUUUUUU (SEQ ID NO: 688) |
| | | ID NO: 676) | |
| | | OMNI-187 or OMNI-188 | OMNI-191, 192 or 193 |
| | | with sgRNA 31 | with sgRNA 32 |
| crRNA: | crRNA | GUUGUGAUUAGCUGAA (SEQ | GUUGUGAUUCGCUUGA (SEQ ID |
| tracrRNA | (Repeat) | ID NO: 689) | NO: 701) |
| duplex V1 | Partial | GUUGUGAUUAGCUGA (SEQ ID | GUUGUGAUUCGCUUG (SEQ ID |
| | crRNA 1 | NO: 690) | NO: 702) |
| | Partial | GUUGUGAUUAGC (SEQ ID NO: | GUUGUGAUUCGC (SEQ ID NO: |
| | crRNA 2 | 691) | 703) |
| | Partial | GUUGUGAUUA (SEQ ID NO: | GUUGUGAUUC (SEQ ID NO: 704) |
| | crRNA 3 | 692) | |
| | tracrRNA | UUCAGCUAAUCACAAU (SEQ | AUAGCGAAUCACAAUAA (SEQ ID |
| | (Antirepeat) | ID NO: 693) | NO: 705) |
| | Partial | UCAGCUAAUCACAAUA (SEQ | AUAGCGAAUCACAAUA (SEQ ID |
| | tracrRNA 1 | ID NO: 694) | NO: 706) |
| | Partial | GCUAAUCACAAUA (SEQ ID | GCGAAUCACAAUA (SEQ ID NO: |
| | tracrRNA 2 | NO: 695) | 707) |
| | Partial | UAAUCACAAUA (SEQ ID NO: | GAAUCACAAUA (SEQ ID NO: 708) |
| | tracrRNA 3 | 696) | |
| TracrRNA | tracrRNA | AAGGAUUAUUCCGUUGUGAA | GGAUUUUAUCCGUUGUGAAAAC |
| sequences | Portion 1 | AACAUUCGGAU (SEQ ID NO: | AUCC (SEQ ID NO: 709) |
| | | 697) | |
| | tracrRNA | Not listed | GGAUUUUAUCC (SEQ ID NO: 710) |
| | Portion 1- | | |
| | partial | | |
| | tracrRNA | CGCCCAUCGUCCUAAAGGUG | GGAGAAGGGGAGCAAUCCCUUU |
| | Portion 2 | GGCGUUUUUU (SEQ ID NO: | CUCUUUUUU (SEQ ID NO: 711) |
| | | 698) | |
| | tracrRNA | CGCCCAUCGUCCUAAAGGUG | GGAGAAGGGGAGCAAUCCCUUU |
| | Portion 2- | GGCG (SEQ ID NO: 699) | CUC (SEQ ID NO: 712) |
| | polyT | | |
| sgRNA | sgRNA V1 | GUUGUGAUUAGCUGAAgaaaU | GUUGUGAUUCGCUUGAgaaaAUA |
| Versions | | UCAGCUAAUCACAAUAAGGA | GCGAAUCACAAUAAGGAUUUUA |
| | | UUAUUCCGUUGUGAAAACAU | UCCGUUGUGAAAACAUCCGGAG |
| | | UCGGAUCGCCCAUCGUCCUA | AAGGGGAGCAAUCCCUUUCUCU |
| | | AAGGUGGGCGUUUUUU (SEQ | UUUUU (SEQ ID NO: 713) |
| | | ID NO: 700) | |
| | sgRNA V2 | Not listed | GUUGUGAUUCGCUUGAgaaaAUA |
| | | | GCGAAUCACAAUAAGGAUCUUA |
| | | | UCCGUUGUGAAAACAUCCGGAG |
| | | | AAGGGGAGCAAUCCCUUUCUCU |
| | | | UUUUU (SEQ ID NO: 714) |
| | sgRNA V2 | Not listed | GGAUCUUAUCCGUUGUGAAAAC |
| | Modified | | AUCC (SEQ ID NO: 715) |
| | tracrRNA | | |
| | Portion 1 | | |
| | | OMNI-194 or OMNI-195 | OMNI-194 or OMNI-195 |
| | | with sgRNA 33 | with sgRNA 34 |
| crRNA: | crRNA | GUUGUGAUUCGCUUUCAAA | GUUGUGAUUCGCUUUCAAA |
| tracrRNA | (Repeat) | (SEQ ID NO: 716) | (SEQ ID NO: 730) |
| duplex V1 | Partial | GUUGUGAUUCGCUUU (SEQ ID | GUUGUGAUUCGCUUU (SEQ ID |
| | crRNA 1 | NO: 717) | NO: 731) |
| | Partial | GUUGUGAUUCGC (SEQ ID NO: | GUUGUGAUUCGC (SEQ ID NO: |
| | crRNA 2 | 718) | 732) |
| | Partial | GUUGUGAUUC (SEQ ID NO: | GUUGUGAUUC (SEQ ID NO: 733) |
| | crRNA 3 | 719) | |
| | tracrRNA | UUUGAAAGCAAAUCACAAU | UUUGAAAGCAAAUCACAAU |
| | (Antirepeat) | (SEQ ID NO: 720) | (SEQ ID NO: 734) |
| | Partial | AAAGCAAAUCACAAUA (SEQ | AAAGCAAAUCACAAUA (SEQ ID |
| | tracrRNA 1 | ID NO: 721) | NO: 735) |
| | Partial | GCAAAUCACAAUA (SEQ ID | GCAAAUCACAAUA (SEQ ID NO: |
| | tracrRNA 2 | NO: 722) | 736) |
| | Partial | AAAUCACAAUA (SEQ ID NO: | AAAUCACAAUA (SEQ ID NO: 737) |
| | tracrRNA 3 | 723) | |
| TracrRNA | tracrRNA | AAGGAUCAUUCCGU (SEQ ID | AAGGAUUAUUCCGU (SEQ ID NO: |
| sequences | Portion 1 | NO: 724) | 738) |
| | tracrRNA | GGAUCAUUCC (SEQ ID NO: | GGAUUAUUCC (SEQ ID NO: 739) |
| | Portion 1- | 725) | |
| | partial | | |
| | tracrRNA | UGUGAAAACAUUU (SEQ ID | UGUGAAAACAUUU (SEQ ID NO: |
| | Portion 2 | NO: 726) | 740) |
| | tracrRNA | GGAAGGGGGAGUAUUUAUAC | GGAAGGGGGAGUAUUUAUACUC |
| | Portion 3 | UCCUCGUUCUUUUUU (SEQ ID | CUCGUUCUUUUUU (SEQ ID NO: |
| | | NO: 727) | 741) |
| | tracrRNA | GGAAGGGGGAGUAUUUAUAC | GGAAGGGGGAGUAUUUAUACUC |
| | Portion 3- | UCCUCGUUC (SEQ ID NO: 728) | CUCGUUC (SEQ ID NO: 742) |
| | polyT | | |
| sgRNA | sgRNA V1 | GUUGUGAUUCGCUUUCAAAga | GUUGUGAUUCGCUUUCAAAgaaa |
| Versions | | aaUUUGAAAGCAAAUCACAAU | UUUGAAAGCAAAUCACAAUAAG |
| | | AAGGAUCAUUCCGUUGUGAA | GAUUAUUCCGUUGUGAAAACAU |
| | | AACAUUUGGAAGGGGGAGUA | UUGGAAGGGGGAGUAUUUAUAC |
| | | UUUAUACUCCUCGUUCUUUU | UCCUCGUUCUUUUUU (SEQ ID |
| | | UU (SEQ ID NO: 729) | NO: 743) |
| | | OMNI-196 with sgRNA 35 | OMNI-197 with sgRNA 36 |
| crRNA: | crRNA | GUUGUGAUUUGCAUUA (SEQ | GUUGUGAUUUGCCUAC (SEQ ID |
| tracrRNA | (Repeat) | ID NO: 744) | NO: 760) |
| duplex V1 | Partial | GUUGUGAUUUGCAUU (SEQ ID | GUUGUGAUUUGCCUA (SEQ ID |
| | crRNA 1 | NO: 745) | NO: 761) |
| | Partial | GUUGUGAUUUGC (SEQ ID NO: | GUUGUGAUUUGC (SEQ ID NO: |
| | crRNA 2 | 746) | 762) |
| | Partial | GUUGUGAUUU (SEQ ID NO: | GUUGUGAUUU (SEQ ID NO: 763) |
| | crRNA 3 | 747) | |
| | tracrRNA | UAUGCAAAUCACAAU (SEQ ID | AUAGGCAAAUCACAAU (SEQ ID |
| | (Antirepeat) | NO: 748) | NO: 764) |
| | Partial | AUGCAAAUCACAAUA (SEQ ID | UAGGCAAAUCACAAUA (SEQ ID |
| | tracrRNA 1 | NO: 749) | NO: 765) |
| | Partial | GCAAAUCACAAUA (SEQ ID | GCAAAUCACAAUA (SEQ ID NO: |
| | tracrRNA 2 | NO: 750) | 766) |
| | Partial | AAAUCACAAUA (SEQ ID NO: | AAAUCACAAUA (SEQ ID NO: 767) |
| | tracrRNA 3 | 751) | |
| TracrRNA | tracrRNA | AAGGAUUAUUCCGU (SEQ ID | AAGGAUUUUAUUCCGU (SEQ ID |
| sequences | Portion 1 | NO: 752) | NO: 768) |
| | tracrRNA | GGAUUAUUCC (SEQ ID NO: | GGAUUUUAUUCC (SEQ ID NO: |
| | Portion 1- | 753) | 769) |
| | partial | | |
| | tracrRNA | UGUGAAAACAUUAGGUUU | UGUGAAAACAUUU (SEQ ID NO: |
| | Portion 2 | (SEQ ID NO: 754) | 770) |
| | tracrRNA | UGCUCUCGUCCUUUAACGGG | GGAAAGAGGAGCAUCGCCUAUU |
| | Portion 3 | AGCAUUUUUU (SEQ ID NO: | GGUUAUGCUCUCUUUUUUUUU |
| | | 755) | (SEQ ID NO: 771) |
| | tracrRNA | UGCUCUCGUCCUUUAACGGG | GGAAAGAGGAGCAUCGCCUAUU |
| | Portion 3- | AGCA (SEQ ID NO: 756) | GGUUAUGCUCUCUUUC (SEQ ID |
| | polyT | | NO: 772) |
| sgRNA | sgRNA V1 | GUUGUGAUUUGCAUUAgaaaU | GUUGUGAUUUGCCUACgaaaAUA |
| Versions | | AUGCAAAUCACAAUAAGGAU | GGCAAAUCACAAUAAGGAUUUU |
| | | UAUUCCGUUGUGAAAACAUU | AUUCCGUUGUGAAAACAUUUGG |
| | | AGGUUUUGCUCUCGUCCUUU | AAAGAGGAGCAUCGCCUAUUGG |
| | | AACGGGAGCAUUUUUU (SEQ | UUAUGCUCUCUUUCUUUUUU |
| | | ID NO: 757) | (SEQ ID NO: 773) |
| | sgRNA V2 | GUUGUGAUUUGCAUUAgaaaU | GUUGUGAUUUGCCUACgaaaAUA |
| | | AUGCAAAUCACAAUAAGGAU | GGCAAAUCACAAUAAGGAUUUC |
| | | UAUUCCGUUGUGAAAACAUU | AUUCCGUUGUGAAAACAUUUGG |
| | | AGGUUCUGCUCUCGUCCUUU | AAAGAGGAGCAUCGCCUAUUGG |
| | | AACGGGAGCAUUUUUU (SEQ | UUAUGCUCUCUUUCUUUUUU |
| | | ID NO: 758) | (SEQ ID NO: 774) |
| | sgRNA V2 | Not listed | AAGGAUUUCAUUCCGU (SEQ ID |
| | Modified | | NO: 775) |
| | tracrRNA | | |
| | Portion 1 | | |
| | sgRNA V2 | UGUGAAAACAUUAGGUUC | Not listed |
| | Modified | (SEQ ID NO: 759) | |
| | tracrRNA | | |
| | Portion 2 | | |
| | | OMNI-198 with sgRNA 37 | OMNI-200 with sgRNA 38 |
| crRNA: | crRNA | GUUGUGAUUUGCGUAA (SEQ | GUUGUGAUUUGCUAAA (SEQ ID |
| tracrRNA | (Repeat) | ID NO: 776) | NO: 789) |
| duplex V1 | Partial | GUUGUGAUUUGCGUA (SEQ ID | GUUGUGAUUUGCUAA (SEQ ID |
| | crRNA 1 | NO: 777) | NO: 790) |
| | Partial | GUUGUGAUUUGC (SEQ ID NO: | GUUGUGAUUUGC (SEQ ID NO: |
| | crRNA 2 | 778) | 791) |
| | Partial | GUUGUGAUUU (SEQ ID NO: | GUUGUGAUUU (SEQ ID NO: 792) |
| | crRNA 3 | 779) | |
| | tracrRNA | UUCGCAAAUCACAAU (SEQ ID | UUAGCAAAUCACAAU (SEQ ID |
| | (Antirepeat) | NO: 780) | NO: 793) |
| | Partial | UCGCAAAUCACAAUA (SEQ ID | UAGCAAAUCACAAUA (SEQ ID |
| | tracrRNA 1 | NO: 781) | NO: 794) |
| | Partial | GCAAAUCACAAUA (SEQ ID | GCAAAUCACAAUA (SEQ ID NO: |
| | tracrRNA 2 | NO: 782) | 795) |
| | Partial | AAAUCACAAUA (SEQ ID NO: | AAAUCACAAUA (SEQ ID NO: 796) |
| | tracrRNA 3 | 783) | |
| TracrRNA | tracrRNA | AAGGAUUAUUCCGUUGUGAG | AAGGAUUAUUCCGUUGUGAAAA |
| sequences | Portion 1 | UACAUUCAGGUA (SEQ ID NO: | CAUUAGGUCCUU (SEQ ID NO: |
| | | 784) | 797) |
| | tracrRNA | GGAUUAUUCC (SEQ ID NO: | Not listed |
| | Portion 1- | 785) | |
| | partial | | |
| | tracrRNA | GCCCAUCGACCUUUAACGGU | GGUCAUCGUCUUUAACGGUGAC |
| | Portion 2 | GGGCAUUUUUU (SEQ ID NO: | CUUUUUU (SEQ ID NO: 798) |
| | | 786) | |
| | tracrRNA | GCCCAUCGACCUUUAACGGU | GGUCAUCGUCUUUAACGGUGAC |
| | Portion 2- | GGGCA (SEQ ID NO: 787) | C (SEQ ID NO: 799) |
| | polyT | | |
| sgRNA | sgRNA V1 | GUUGUGAUUUGCGUAAgaaaU | GUUGUGAUUUGCUAAAgaaaUUA |
| Versions | | UCGCAAAUCACAAUAAGGAU | GCAAAUCACAAUAAGGAUUAUU |
| | | UAUUCCGUUGUGAGUACAUU | CCGUUGUGAAAACAUUAGGUCC |
| | | CAGGUAGCCCAUCGACCUUU | UUGGUCAUCGUCUUUAACGGUG |
| | | AACGGUGGGCAUUUUUU (SEQ | ACCUUUUUU (SEQ ID NO: 800) |
| | | ID NO: 788) | |
| | | OMNI-201 with sgRNA 39 | OMNI-203 with sgRNA 40 |
| crRNA: | crRNA | GUUGUGAUUUGCUAAA (SEQ | GUUGUGAUUUGCUAAA (SEQ ID |
| tracrRNA | (Repeat) | ID NO: 801) | NO: 813) |
| duplex V1 | Partial | GUUGUGAUUUGCUAA (SEQ ID | GUUGUGAUUUGCUAA (SEQ ID |
| | crRNA 1 | NO: 802) | NO: 814) |
| | Partial | GUUGUGAUUUGC (SEQ ID NO: | GUUGUGAUUUGC (SEQ ID NO: |
| | crRNA 2 | 803) | 815) |
| | Partial | GUUGUGAUUU (SEQ ID NO: | GUUGUGAUUU (SEQ ID NO: 816) |
| | crRNA 3 | 804) | |
| | tracrRNA | UUAGCAAAUCACAAU (SEQ ID | UUAGCAAAUCACAAU (SEQ ID |
| | (Antirepeat) | NO: 805) | NO: 817) |
| | Partial | UAGCAAAUCACAAUA (SEQ ID | UAGCAAAUCACAAUA (SEQ ID |
| | tracrRNA 1 | NO: 806) | NO: 818) |
| | Partial | GCAAAUCACAAUA (SEQ ID | GCAAAUCACAAUA (SEQ ID NO: |
| | tracrRNA 2 | NO: 807) | 819) |
| | Partial | AAAUCACAAUA (SEQ ID NO: | AAAUCACAAUA (SEQ ID NO: 820) |
| | tracrRNA 3 | 808) | |
| TracrRNA | tracrRNA | AAGGAUUAUUCCGUUGUGAA | AAGGAUUAUUCCGUUGUGAACA |
| sequences | Portion 1 | AACAUUAGGUCCU (SEQ ID | CAUUAGGUU (SEQ ID NO: 821) |
| | | NO: 809) | |
| | tracrRNA | Not listed | GGAUUAUUCC (SEQ ID NO: 822) |
| | Portion 1- | | |
| | partial | | |
| | tracrRNA | GGUCCAUCGUCCUCAACGGU | GGCCCAUCGUCCUUUAACGGUG |
| | Portion 2 | GGACUUUUUU (SEQ ID NO: | GGUUUUUU (SEQ ID NO: 823) |
| | | 810) | |
| | tracrRNA | GGUCCAUCGUCCUCAACGGU | GGCCCAUCGUCCUUUAACGGUG |
| | Portion 2- | GGAC (SEQ ID NO: 811) | GG (SEQ ID NO: 824) |
| | polyT | | |
| sgRNA | sgRNA V1 | GUUGUGAUUUGCUAAAgaaaU | GUUGUGAUUUGCUAAAgaaaUUA |
| Versions | | UAGCAAAUCACAAUAAGGAU | GCAAAUCACAAUAAGGAUUAUU |
| | | UAUUCCGUUGUGAAAACAUU | CCGUUGUGAACACAUUAGGUUG |
| | | AGGUCCUGGUCCAUCGUCCU | GCCCAUCGUCCUUUAACGGUGG |
| | | CAACGGUGGACUUUUUU (SEQ | GUUUUUU (SEQ ID NO: 825) |
| | | ID NO: 812) | |
| | | OMNI-205 with sgRNA 41 | OMNI-206 with sgRNA 42 |
| crRNA: | crRNA | GUUGUGAUUUGCUAGA (SEQ | GUUGUGAUUUGCUAGA (SEQ ID |
| tracrRNA | (Repeat) | ID NO: 826) | NO: 838) |
| duplex V1 | Partial | GUUGUGAUUUGCUAG (SEQ ID | GUUGUGAUUUGCUAG (SEQ ID |
| | crRNA 1 | NO: 827) | NO: 839) |
| | Partial | GUUGUGAUUUGC (SEQ ID NO: | GUUGUGAUUUGC (SEQ ID NO: |
| | crRNA 2 | 828) | 840) |
| | Partial | GUUGUGAUUU (SEQ ID NO: | GUUGUGAUUU (SEQ ID NO: 841) |
| | crRNA 3 | 829) | |
| | tracrRNA | UCUAGCAAAUCACAAU (SEQ | UUAGCAAAUCACAAU (SEQ ID |
| | (Antirepeat) | ID NO: 830) | NO: 842) |
| | Partial | CUAGCAAAUCACAAUA (SEQ | UAGCAAAUCACAAUA (SEQ ID |
| | tracrRNA 1 | ID NO: 831) | NO: 843) |
| | Partial | GCAAAUCACAAUA (SEQ ID | GCAAAUCACAAUA (SEQ ID NO: |
| | tracrRNA 2 | NO: 832) | 844) |
| | Partial | AAAUCACAAUA (SEQ ID NO: | AAAUCACAAUA (SEQ ID NO: 845) |
| | tracrRNA 3 | 833) | |
| TracrRNA | tracrRNA | AAGGAUUAUUCCGUUGUGAA | AAGGAUUAUUCCGUUGUGAAAA |
| sequences | Portion 1 | AACAUUAGGUCCC (SEQ ID | CAUUAGGUCCC (SEQ ID NO: 846) |
| | | NO: 834) | |
| | tracrRNA | AUCCCCAUCGUCCUUUAACG | AGUCCAUCGUCCUCAACGGUGG |
| | Portion 2 | GUGGGGAUUUUUU (SEQ ID | ACUUUUUU (SEQ ID NO: 847) |
| | | NO: 835) | |
| | tracrRNA | AUCCCCAUCGUCCUUUAACG | AGUCCAUCGUCCUCAACGGUGG |
| | Portion 2- | GUGGGGA (SEQ ID NO: 836) | AC (SEQ ID NO: 848) |
| | polyT | | |
| sgRNA | sgRNA V1 | GUUGUGAUUUGCUAGAgaaaU | GUUGUGAUUUGCUAGAgaaaUUA |
| Versions | | CUAGCAAAUCACAAUAAGGA | GCAAAUCACAAUAAGGAUUAUU |
| | | UUAUUCCGUUGUGAAAACAU | CCGUUGUGAAAACAUUAGGUCC |
| | | UAGGUCCCAUCCCCAUCGUCC | CAGUCCAUCGUCCUCAACGGUG |
| | | UUUAACGGUGGGGAUUUUUU | GACUUUUUU (SEQ ID NO: 849) |
| | | (SEQ ID NO: 837) | |
| | | OMNI-207 with sgRNA 43 | OMNI-208 with sgRNA 44 |
| crRNA: | crRNA | GUUGUGAUUUGCUCAA (SEQ | GUUGUGAUUUGCUGAC (SEQ ID |
| tracrRNA | (Repeat) | ID NO: 850) | NO: 864) |
| duplex V1 | Partial | GUUGUGAUUUGCUCA (SEQ ID | GUUGUGAUUUGCUGA (SEQ ID |
| | crRNA 1 | NO: 851) | NO: 865) |
| | Partial | GUUGUGAUUUGC (SEQ ID NO: | GUUGUGAUUUGC (SEQ ID NO: |
| | crRNA 2 | 852) | 866) |
| | Partial | GUUGUGAUUU (SEQ ID NO: | GUUGUGAUUU (SEQ ID NO: 867) |
| | crRNA 3 | 853) | |
| | tracrRNA | UUGAGCAAAUCACAAU (SEQ | AUCAGCAAAUCACAAU (SEQ ID |
| | (Antirepeat) | ID NO: 854) | NO: 868) |
| | Partial | UGAGCAAAUCACAAUA (SEQ | UCAGCAAAUCACAAUA (SEQ ID |
| | tracrRNA 1 | ID NO: 855) | NO: 869) |
| | Partial | GCAAAUCACAAUA (SEQ ID | GCAAAUCACAAUA (SEQ ID NO: |
| | tracrRNA 2 | NO: 856) | 870) |
| | Partial | AAAUCACAAUA (SEQ ID NO: | AAAUCACAAUA (SEQ ID NO: 871) |
| | tracrRNA 3 | 857) | |
| TracrRNA | tracrRNA | AAGGAUUAUUCCGU (SEQ ID | AAGGAUUAUUCCGU (SEQ ID NO: |
| sequences | Portion 1 | NO: 858) | 872) |
| | tracrRNA | GGAUUAUUCC (SEQ ID NO: | GGAUUAUUCC (SEQ ID NO: 873) |
| | Portion 1- | 859) | |
| | partial | | |
| | tracrRNA | UGUGAAAACAUUAGGUU (SEQ | UGUGAAAACAUUU (SEQ ID NO: |
| | Portion 2 | ID NO: 860) | 874) |
| | tracrRNA | GGCCCAUCGUCCUUUAACGG | AGGGUGGGGCAACUCACCCUUU |
| | Portion 3 | UGGGUUUUUU (SEQ ID NO: | UUU (SEQ ID NO: 875) |
| | | 861) | |
| | tracrRNA | GGCCCAUCGUCCUUUAACGG | AGGGUGGGGCAACUCACCC (SEQ |
| | Portion 3- | UGGG (SEQ ID NO: 862) | ID NO: 876) |
| | polyT | | |
| sgRNA | sgRNA V1 | GUUGUGAUUUGCUCAAgaaaU | GUUGUGAUUUGCUGACgaaaAUC |
| Versions | | UGAGCAAAUCACAAUAAGGA | AGCAAAUCACAAUAAGGAUUAU |
| | | UUAUUCCGUUGUGAAAACAU | UCCGUUGUGAAAACAUUUAGGG |
| | | UAGGUUGGCCCAUCGUCCUU | UGGGGCAACUCACCCUUUUUU |
| | | UAACGGUGGGUUUUUU (SEQ | (SEQ ID NO: 877) |
| | | ID NO: 863) | |
| | | OMNI-209 with sgRNA 45 | OMNI-211 with sgRNA 46 |
| crRNA: | crRNA | GUUGUGAUUUGCUUAA (SEQ | GUUGUGAUUUGCUUAAAAU |
| tracrRNA | (Repeat) | ID NO: 878) | (SEQ ID NO: 892) |
| duplex V1 | Partial | GUUGUGAUUUGCUUA (SEQ ID | GUUGUGAUUUGCUUA (SEQ ID |
| | crRNA 1 | NO: 879) | NO: 893) |
| | Partial | GUUGUGAUUUGC (SEQ ID NO: | GUUGUGAUUUGC (SEQ ID NO: |
| | crRNA 2 | 880) | 894) |
| | Partial | GUUGUGAUUU (SEQ ID NO: | GUUGUGAUUU (SEQ ID NO: 895) |
| | crRNA 3 | 881) | |
| | tracrRNA | UAAGCAAAUCACAAU (SEQ ID | GUGAAAGACUUUUCACAAC (SEQ |
| | (Antirepeat) | NO: 882) | ID NO: 896) |
| | Partial | UAAGCAAAUCACAAUA (SEQ | AAAGACUUUUCACAACA (SEQ ID |
| | tracrRNA 1 | ID NO: 883) | NO: 897) |
| | Partial | GCAAAUCACAAUA (SEQ ID | GACUUUUCACAACA (SEQ ID NO: |
| | tracrRNA 2 | NO: 884) | 898) |
| | Partial | AAAUCACAAUA (SEQ ID NO: | UUUUCACAACA (SEQ ID NO: 899) |
| | tracrRNA 3 | 885) | |
| TracrRNA | tracrRNA | AAGGAUUAUUCCG (SEQ ID | AAGGCUAUAAGCCGUAGAUUUC |
| sequences | Portion 1 | NO: 886) | UU (SEQ ID NO: 900) |
| | tracrRNA | GGAUUAUUCC (SEQ ID NO: | GGCUAUAAGCC (SEQ ID NO: 901) |
| | Portion 1- | 887) | |
| | partial | | |
| | tracrRNA | UUGUGAAAACAAAU (SEQ ID | ACUCCUGCGUACUCCGUGGGAG |
| | Portion 2 | NO: 888) | UUUUUU (SEQ ID NO: 902) |
| | tracrRNA | Not listed | ACUCCUGCGUACUCCGUGGGAG |
| | Portion 2- | | (SEQ ID NO: 903) |
| | polyT | | |
| | tracrRNA | GGGCGGGGUGACUCGCCCUU | Not listed |
| | Portion 3 | UUUU (SEQ ID NO: 889) | |
| | tracrRNA | GGGCGGGGUGACUCGCCC | Not listed |
| | Portion 3- | (SEQ ID NO: 890) | |
| | polyT | | |
| sgRNA | sgRNA V1 | GUUGUGAUUUGCUUAAgaaaU | GUUGUGAUUUGCUUAAAAUgaaa |
| Versions | | AAGCAAAUCACAAUAAGGAU | GUGAAAGACUUUUCACAACAAG |
| | | UAUUCCGUUGUGAAAACAAA | GCUAUAAGCCGUAGAUUUCUUA |
| | | UGGGCGGGGUGACUCGCCCU | CUCCUGCGUACUCCGUGGGAGU |
| | | UUUUU (SEQ ID NO: 891) | UUUUU (SEQ ID NO: 904) |
| | sgRNA V2 | Not listed | GUUGUGAUUUGCUUAAAAUgaaa |
| | | | GUGAAAGACUUCUCACAACAAG |
| | | | GCUAUAAGCCGUAGAUUUCUUA |
| | | | CUCCUGCGUACUCCGUGGGAGU |
| | | | UUUUU (SEQ ID NO: 905) |
| | sgRNA V2 | Not listed | GUGAAAGACUUCUCACAAC (SEQ |
| | tracrRNA | | ID NO: 906) |
| | (Antirepeat) | | |
| | | OMNI-212 with sgRNA 47 | OMNI-213 with sgRNA 48 |
| crRNA: | crRNA | GUUGUGAUUUGCUUAG (SEQ | GUUGUGAUUUGCUUAG (SEQ ID |
| tracrRNA | (Repeat) | ID NO: 907) | NO: 921) |
| duplex V1 | Partial | GUUGUGAUUUGCUUA (SEQ ID | GUUGUGAUUUGCUUA (SEQ ID |
| | crRNA 1 | NO: 908) | NO: 922) |
| | Partial | GUUGUGAUUUGC (SEQ ID NO: | GUUGUGAUUUGC (SEQ ID NO: |
| | crRNA 2 | 909) | 923) |
| | Partial | GUUGUGAUUU (SEQ ID NO: | GUUGUGAUUU (SEQ ID NO: 924) |
| | crRNA 3 | 910) | |
| | tracrRNA | CUAGCAAAUCACAAU (SEQ ID | UAAGCAAAUCACAAU (SEQ ID |
| | (Antirepeat) | NO: 911) | NO: 925) |
| | Partial | UAGCAAAUCACAAUA (SEQ ID | UAAGCAAAUCACAAUA (SEQ ID |
| | tracrRNA 1 | NO: 912) | NO: 926) |
| | Partial | GCAAAUCACAAUA (SEQ ID | GCAAAUCACAAUA (SEQ ID NO: |
| | tracrRNA 2 | NO: 913) | 927) |
| | Partial | AAAUCACAAUA (SEQ ID NO: | AAAUCACAAUA (SEQ ID NO: 928) |
| | tracrRNA 3 | 914) | |
| TracrRNA | tracrRNA | AAGGAUUAUUCCGUUGU (SEQ | AAGGAUUAUUCCGUUGUGAAAA |
| sequences | Portion 1 | ID NO: 915) | CAUCCGGAGAG (SEQ ID NO: 929) |
| | tracrRNA | GGAUUAUUCC (SEQ ID NO: | GGAUUAUUCC (SEQ ID NO: 930) |
| | Portion 1- | 916) | |
| | partial | | |
| | tracrRNA | GAACACAUCAGGUUCU (SEQ | GGAAAGCCGACAGGUUUUUU |
| | Portion 2 | ID NO: 917) | (SEQ ID NO: 931) |
| | tracrRNA | Not listed | GGAAAGCCGACAGG (SEQ ID NO: |
| | Portion 2- | | 932) |
| | polyT | | |
| | tracrRNA | UCCCCAUCGUCCUUUAACGG | Not listed |
| | Portion 3 | UGGGGAUUUUUU (SEQ ID NO: | |
| | | 918) | |
| | tracrRNA | UCCCCAUCGUCCUUUAACGG | Not listed |
| | Portion 3- | UGGGGA (SEQ ID NO: 919) | |
| | polyT | | |
| sgRNA | sgRNA V1 | GUUGUGAUUUGCUUAGgaaaC | GUUGUGAUUUGCUUAGgaaaUAA |
| Versions | | UAGCAAAUCACAAUAAGGAU | GCAAAUCACAAUAAGGAUUAUU |
| | | UAUUCCGUUGUGAACACAUC | CCGUUGUGAAAACAUCCGGAGA |
| | | AGGUUCUUCCCCAUCGUCCU | GGGAAAGCCGACAGGUUUUUU |
| | | UUAACGGUGGGGAUUUUUU | (SEQ ID NO: 933) |
| | | (SEQ ID NO: 920) | |
| | | OMNI-214 with sgRNA 49 | OMNI-215 with sgRNA 50 |
| crRNA: | crRNA | GUUGUGAUUUGCUUUA (SEQ | GUUGUGAUUUGCUUUA (SEQ ID |
| tracrRNA | (Repeat) | ID NO: 934) | NO: 948) |
| duplex V1 | Partial | GUUGUGAUUUGCUUU (SEQ ID | GUUGUGAUUUGCUUU (SEQ ID |
| | crRNA 1 | NO: 935) | NO: 949) |
| | Partial | GUUGUGAUUUGC (SEQ ID NO: | GUUGUGAUUUGC (SEQ ID NO: |
| | crRNA 2 | 936) | 950) |
| | Partial | GUUGUGAUUU (SEQ ID NO: | GUUGUGAUUU (SEQ ID NO: 951) |
| | crRNA 3 | 937) | |
| | tracrRNA | UAAGCAAAUCACAAU (SEQ ID | UAAGCAAAUCACAAU (SEQ ID |
| | (Antirepeat) | NO: 938) | NO: 952) |
| | Partial | AAGCAAAUCACAAUA (SEQ ID | AAGCAAAUCACAAUA (SEQ ID |
| | tracrRNA 1 | NO: 939) | NO: 953) |
| | Partial | GCAAAUCACAAUA (SEQ ID | GCAAAUCACAAUA (SEQ ID NO: |
| | tracrRNA 2 | NO: 940) | 954) |
| | Partial | AAAUCACAAUA (SEQ ID NO: | AAAUCACAAUA (SEQ ID NO: 955) |
| | tracrRNA 3 | 941) | |
| TracrRNA | tracrRNA | AAGGAUUAUUCCGU (SEQ ID | AAGGAUUUUAUCCGU (SEQ ID |
| sequences | Portion 1 | NO: 942) | NO: 956) |
| | tracrRNA | GGAUUAUUCC (SEQ ID NO: | GGAUUUUAUCC (SEQ ID NO: 957) |
| | Portion 1- | 943) | |
| | partial | | |
| | tracrRNA | UGUGAAAACAUUAGGUUCU | UGUGAAAACAUUU (SEQ ID NO: |
| | Portion 2 | (SEQ ID NO: 944) | 958) |
| | tracrRNA | GCCCUCGUCCUUUAACGGGG | CGGGAGGGGCAACUCUCCCGCU |
| | Portion 3 | GCUUUCUUUUUU (SEQ ID NO: | UUUUU (SEQ ID NO: 959) |
| | | 945) | |
| | tracrRNA | GCCCUCGUCCUUUAACGGGG | CGGGAGGGGCAACUCUCCCGC |
| | Portion 3- | GCUUUC (SEQ ID NO: 946) | (SEQ ID NO: 960) |
| | polyT | | |
| sgRNA | sgRNA V1 | GUUGUGAUUUGCUUUAgaaaU | GUUGUGAUUUGCUUUAgaaaUAA |
| Versions | | AAGCAAAUCACAAUAAGGAU | GCAAAUCACAAUAAGGAUUUUA |
| | | UAUUCCGUUGUGAAAACAUU | UCCGUUGUGAAAACAUUUCGGG |
| | | AGGUUCUGCCCUCGUCCUUU | AGGGGCAACUCUCCCGCUUUUU |
| | | AACGGGGGCUUUCUUUUUU | U (SEQ ID NO: 961) |
| | | (SEQ ID NO: 947) | |
| | sgRNA V2 | Not listed | GUUGUGAUUUGCUUUAgaaaUAA |
| | | | GCAAAUCACAAUAAGGAUUCUA |
| | | | UCCGUUGUGAAAACAUUUCGGG |
| | | | AGGGGCAACUCUCCCGCUUUUU |
| | | | U (SEQ ID NO: 962) |
| | sgRNA V2 | Not listed | AAGGAUUCUAUCCGU (SEQ ID |
| | Modified | | NO: 963) |
| | tracrRNA | | |
| | Portion 1 | | |
| | | OMNI-216 with sgRNA 51 | OMNI-217 with sgRNA 52 |
| crRNA: | crRNA | GUUGUGAUUUGCUUUG (SEQ | GUUGUGGAUUGCACGCAAA |
| tracrRNA | (Repeat) | ID NO: 964) | (SEQ ID NO: 978) |
| duplex V1 | Partial | GUUGUGAUUUGCUUU (SEQ ID | GUUGUGGAUUGCACG (SEQ ID |
| | crRNA 1 | NO: 965) | NO: 979) |
| | Partial | GUUGUGAUUUGC (SEQ ID NO: | GUUGUGGAUUGC (SEQ ID NO: |
| | crRNA 2 | 966) | 980) |
| | Partial | GUUGUGAUUU (SEQ ID NO: | GUUGUGGAUU (SEQ ID NO: 981) |
| | crRNA 3 | 967) | |
| | tracrRNA | CAAAGCAAAUCACAAU (SEQ | UGUGUGCUUUACACAAC (SEQ ID |
| | (Antirepeat) | ID NO: 968) | NO: 982) |
| | Partial | AAAGCAAAUCACAAUA (SEQ | UGUGCUUUACACAACA (SEQ ID |
| | tracrRNA 1 | ID NO: 969) | NO: 983) |
| | Partial | GCAAAUCACAAUA (SEQ ID | GCUUUACACAACA (SEQ ID NO: |
| | tracrRNA 2 | NO: 970) | 984) |
| | Partial | AAAUCACAAUA (SEQ ID NO: | UUUACACAACA (SEQ ID NO: 985) |
| | tracrRNA 3 | 971) | |
| TracrRNA | tracrRNA | AAGGAUUAUUCCGU (SEQ ID | AAGGCUAUAAGCCGU (SEQ ID |
| sequences | Portion 1 | NO: 972) | NO: 986) |
| | tracrRNA | GGAUUAUUCC (SEQ ID NO: | GGCUAUAAGCC (SEQ ID NO: 987) |
| | Portion 1- | 973) | |
| | partial | | |
| | tracrRNA | UGUGAAAACAUCUG (SEQ ID | AGAUUUUUCUC (SEQ ID NO: 988) |
| | Portion 2 | NO: 974) | |
| | tracrRNA | GAGAGGGAUGACCUUGCGGU | AAUCCCGCGUACUCCGUGGGAU |
| | Portion 3 | UGUCUCUCUCGUCUUUUUU | UUUUU (SEQ ID NO: 989) |
| | | (SEQ ID NO: 975) | |
| | tracrRNA | GAGAGGGAUGACCUUGCGGU | AAUCCCGCGUACUCCGUGGGA |
| | Portion 3- | UGUCUCUCUCGUC (SEQ ID | (SEQ ID NO: 990) |
| | polyT | NO: 976) | |
| sgRNA | sgRNA V1 | GUUGUGAUUUGCUUUGgaaaC | GUUGUGGAUUGCACGCAAAgaaa |
| Versions | | AAAGCAAAUCACAAUAAGGA | UGUGUGCUUUACACAACAAGGC |
| | | UUAUUCCGUUGUGAAAACAU | UAUAAGCCGUAGAUUUUUCUCA |
| | | CUGGAGAGGGAUGACCUUGC | AUCCCGCGUACUCCGUGGGAUU |
| | | GGUUGUCUCUCUCGUCUUUU | UUUU (SEQ ID NO: 991) |
| | | UU (SEQ ID NO: 977) | |
| | sgRNA V2 | Not listed | GUUGUGGAUUGCACGCAAAgaaa |
| | | | UGUGUGCUUUACACAACAAGGC |
| | | | UAUAAGCCGUAGAUUCUUCUCA |
| | | | AUCCCGCGUACUCCGUGGGAUU |
| | | | UUUU (SEQ ID NO: 992) |
| | sgRNA V2 | Not listed | AGAUUCUUCUC (SEQ ID NO: 993) |
| | Modified | | |
| | tracrRNA | | |
| | Portion 2 | | |
| | | OMNI-219 with sgRNA 53 | OMNI-220 with sgRNA 54 |
| crRNA: | crRNA | GUUGUGGUUUGAUGAUGAU | GUUGUGGUUUGAUGUAGGA |
| tracrRNA | (Repeat) | (SEQ ID NO: 994) | (SEQ ID NO: 1010) |
| duplex V1 | Partial | GUUGUGGUUUGAUGA (SEQ ID | GUUGUGGUUUGAUGU (SEQ ID |
| | crRNA 1 | NO: 995) | NO: 1011) |
| | Partial | GUUGUGGUUUGA (SEQ ID NO: | GUUGUGGUUUGA (SEQ ID NO: |
| | crRNA 2 | 996) | 1012) |
| | Partial | GUUGUGGUUU (SEQ ID NO: | GUUGUGGUUU (SEQ ID NO: 1013) |
| | crRNA 3 | 997) | |
| | tracrRNA | AUCAUCAUCUUAUCACAAU | UCCUACAUCUUAUCACAAU (SEQ |
| | (Antirepeat) | (SEQ ID NO: 998) | ID NO: 1014) |
| | Partial | UCAUCUUAUCACAAUA (SEQ | ACAUCUUAUCACAAUA (SEQ ID |
| | tracrRNA 1 | ID NO: 999) | NO: 1015) |
| | Partial | UCUUAUCACAAUA (SEQ ID | UCUUAUCACAAUA (SEQ ID NO: |
| | tracrRNA 2 | NO: 1000) | 1016) |
| | Partial | UUAUCACAAUA (SEQ ID NO: | UUAUCACAAUA (SEQ ID NO: |
| | tracrRNA 3 | 1001) | 1017) |
| TracrRNA | tracrRNA | AAGGCUAUAUGCC (SEQ ID | AAGGCCAUUAUGGCCGA (SEQ ID |
| sequences | Portion 1 | NO: 1002) | NO: 1018) |
| | tracrRNA | GGCUAUAUGCC (SEQ ID NO: | GGCCAUUAUGGCC (SEQ ID NO: |
| | Portion 1- | 1003) | 1019) |
| | partial | | |
| | tracrRNA | GAAGGUAUUAACCUUUU (SEQ | AGGGUAAAACCUAC (SEQ ID NO: |
| | Portion 2 | ID NO: 1004) | 1020) |
| | tracrRNA | GCCUCUCUUCUGGAGAGGCU | GCUCCCGCUUCGGUGGGAGCUU |
| | Portion 3 | UAUUUUUU (SEQ ID NO: 1005) | UUUU (SEQ ID NO: 1021) |
| | tracrRNA | GCCUCUCUUCUGGAGAGGCU | GCUCCCGCUUCGGUGGGAGC |
| | Portion 3- | UA (SEQ ID NO: 1006) | (SEQ ID NO: 1022) |
| | polyT | | |
| sgRNA | sgRNA V1 | GUUGUGGUUUGAUGAUGAUga | GUUGUGGUUUGAUGUAGGAgaaa |
| Versions | | aaAUCAUCAUCUUAUCACAAU | UCCUACAUCUUAUCACAAUAAG |
| | | AAGGCUAUAUGCCGAAGGUA | GCCAUUAUGGCCGAAGGGUAAA |
| | | UUAACCUUUUGCCUCUCUUC | ACCUACGCUCCCGCUUCGGUGG |
| | | UGGAGAGGCUUAUUUUUU | GAGCUUUUUU (SEQ ID NO: 1023) |
| | | (SEQ ID NO: 1007) | |
| | sgRNA V2 | GUUGUGGUUUGAUGAUGAUga | Not listed |
| | | aaAUCAUCAUCUUAUCACAAU | |
| | | AAGGCUAUAUGCCGAAGGUA | |
| | | UUAACCUUUCGCCUCUCUUC | |
| | | UGGAGAGGCUUAUUUUUU | |
| | | (SEQ ID NO: 1008) | |
| | sgRNA V2 | GAAGGUAUUAACCUUUC (SEQ | Not listed |
| | Modified | ID NO: 1009) | |
| | tracrRNA | | |
| | Portion 2 | | |
| | | OMNI-222 or OMNI-223 | OMNI-222 or OMNI-223 |
| | | with sgRNA 55 | with sgRNA 56 |
| crRNA: | crRNA | GUUGUGUAUAUCACUC (SEQ | GUUGUGUAUAUCACUC (SEQ ID |
| tracrRNA | (Repeat) | ID NO: 1024) | NO: 1038) |
| duplex V1 | Partial | GUUGUGUAUAUCACU (SEQ ID | GUUGUGUAUAUCACU (SEQ ID |
| | crRNA 1 | NO: 1025) | NO: 1039) |
| | Partial | GUUGUGUAUAUC (SEQ ID NO: | GUUGUGUAUAUC (SEQ ID NO: |
| | crRNA 2 | 1026) | 1040) |
| | Partial | GUUGUGUAUA (SEQ ID NO: | GUUGUGUAUA (SEQ ID NO: 1041) |
| | crRNA 3 | 1027) | |
| | tracrRNA | GAGUGAUAUACACAAU (SEQ | GAGUGAUAUACACAAU (SEQ ID |
| | (Antirepeat) | ID NO: 1028) | NO: 1042) |
| | Partial | AGUGAUAUACACAAUA (SEQ | AGUGAUAUACACAAUA (SEQ ID |
| | tracrRNA 1 | ID NO: 1029) | NO: 1043) |
| | Partial | GAUAUACACAAUA (SEQ ID | GAUAUACACAAUA (SEQ ID NO: |
| | tracrRNA 2 | NO: 1030) | 1044) |
| | Partial | UAUACACAAUA (SEQ ID NO: | UAUACACAAUA (SEQ ID NO: |
| | tracrRNA 3 | 1031) | 1045) |
| TracrRNA | tracrRNA | AAGGAUUAUUCCGU (SEQ ID | AAGGAUUAUUCCGU (SEQ ID NO: |
| sequences | Portion 1 | NO: 1032) | 1046) |
| | tracrRNA | GGAUUAUUCC (SEQ ID NO: | GGAUUAUUCC (SEQ ID NO: 1047) |
| | Portion 1- | 1033) | |
| | partial | | |
| | tracrRNA | UGUGUAAACAUUC (SEQ ID | UGUGUAAACAUUC (SEQ ID NO: |
| | Portion 2 | NO: 1034) | 1048) |
| | tracrRNA | AGGGUGGGACAUUGCUAGAC | AGGGUGGGACAUUGCUGGACAG |
| | Portion 3 | AGUGUCUCGCCCUUUUUU | UGUCUCGCCCUUUUUU (SEQ ID |
| | | (SEQ ID NO: 1035) | NO: 1049) |
| | tracrRNA | AGGGUGGGACAUUGCUAGAC | AGGGUGGGACAUUGCUGGACAG |
| | Portion 3- | AGUGUCUCGCCC (SEQ ID NO: | UGUCUCGCCC (SEQ ID NO: 1050) |
| | polyT | 1036) | |
| sgRNA | sgRNA V1 | GUUGUGUAUAUCACUCgaaaGA | GUUGUGUAUAUCACUCgaaaGAG |
| Versions | | GUGAUAUACACAAUAAGGAU | UGAUAUACACAAUAAGGAUUAU |
| | | UAUUCCGUUGUGUAAACAUU | UCCGUUGUGUAAACAUUCAGGG |
| | | CAGGGUGGGACAUUGCUAGA | UGGGACAUUGCUGGACAGUGUC |
| | | CAGUGUCUCGCCCUUUUUU | UCGCCCUUUUUU (SEQ ID NO: |
| | | (SEQ ID NO: 1037) | 1051) |
| | | OMNI-226 with sgRNA 57 | OMNI-227 with sgRNA 58 |
| crRNA: | crRNA | GUUUGAGAGCCUUGUUA (SEQ | GUUUGAGAGCCUUGUUA (SEQ ID |
| tracrRNA | (Repeat) | ID NO: 1052) | NO: 1068) |
| duplex V1 | Partial | GUUUGAGAGCCUUGU (SEQ ID | GUUUGAGAGCCUUGU (SEQ ID |
| | crRNA 1 | NO: 1053) | NO: 1069) |
| | Partial | GUUUGAGAGCCU (SEQ ID NO: | GUUUGAGAGCCU (SEQ ID NO: |
| | crRNA 2 | 1054) | 1070) |
| | Partial | GUUUGAGAGC (SEQ ID NO: | GUUUGAGAGC (SEQ ID NO: 1071) |
| | crRNA 3 | 1055) | |
| | tracrRNA | UAACAAGGCGAGUGCAAAU | UAACAAGGCAAGUUCAAAU |
| | (Antirepeat) | (SEQ ID NO: 1056) | (SEQ ID NO: 1072) |
| | Partial | ACAAGGCGAGUGCAAAUA | ACAAGGCAAGUUCAAAUA (SEQ |
| | tracrRNA 1 | (SEQ ID NO: 1057) | ID NO: 1073) |
| | Partial | AGGCGAGUGCAAAUA (SEQ ID | AGGCAAGUUCAAAUA (SEQ ID |
| | tracrRNA 2 | NO: 1058) | NO: 1074) |
| | Partial | GCGAGUGCAAAUA (SEQ ID | GCAAGUUCAAAUA (SEQ ID NO: |
| | tracrRNA 3 | NO: 1059) | 1075) |
| TracrRNA | tracrRNA | AAGGAUAAAUCCGAU (SEQ ID | AAAACUUUUGUCUGAUCAUUUU |
| sequences | Portion 1 | NO: 1060) | GUCGCAUUGGCGAU (SEQ ID NO: |
| | | | 1076) |
| | tracrRNA | GGAUAAAUCC (SEQ ID NO: | Not listed |
| | Portion 1- | 1061) | |
| | partial | | |
| | tracrRNA | AUCGCUUUUGAGUCCGCAUG | UGCUCUUCUCAUAUGAGAGGAG |
| | Portion 2 | GUGCGGCUAAAAGGAUCUGU | CAUUUUUU (SEQ ID NO: 1077) |
| | | UUUUU (SEQ ID NO: 1062) | |
| | tracrRNA | AUCGCUUUUGAGUCCGCAUG | UGCUCUUCUCAUAUGAGAGGAG |
| | Portion 2- | GUGCGGCUAAAAGGAUCUG | CA (SEQ ID NO: 1078) |
| | polyT | (SEQ ID NO: 1063) | |
| sgRNA | sgRNA V1 | GUUUGAGAGCCUUGUUAgaaa | GUUUGAGAGCCUUGUUAgaaaUA |
| Versions | | UAACAAGGCGAGUGCAAAUA | ACAAGGCAAGUUCAAAUAAAAC |
| | | AGGAUAAAUCCGAUAUCGCU | UUUUGUCUGAUCAUUUUGUCGC |
| | | UUUGAGUCCGCAUGGUGCGG | AUUGGCGAUUGCUCUUCUCAUA |
| | | CUAAAAGGAUCUGUUUUUU | UGAGAGGAGCAUUUUUU (SEQ ID |
| | | (SEQ ID NO: 1064) | NO: 1079) |
| | sgRNA V2 | GUUUGAGAGCCUUGUUAgaaa | GUUUGAGAGCCUUGUUAgaaaUA |
| | | UAACAAGGCGAGUGCAAAUA | ACAAGGCAAGUUCAAAUAAAAC |
| | | AGGAUAAAUCCGAUAUCGCU | UUCUGUCUGAUCAUUCUGUCGC |
| | | UCUGAGUCCGCAUGGUGCGG | AUUGGCGAUUGCUCUUCUCAUA |
| | | CUAGAAGGAUCUGUUUUUU | UGAGAGGAGCAUUUUUU (SEQ ID |
| | | (SEQ ID NO: 1065) | NO: 1080) |
| | sgRNA V2 | Not listed | AAAACUUCUGUCUGAUCAUUCU |
| | Modified | | GUCGCAUUGGCGAU (SEQ ID NO: |
| | tracrRNA | | 1081) |
| | Portion 1 | | |
| | sgRNA V2 | AUCGCUUCUGAGUCCGCAUG | Not listed |
| | Modified | GUGCGGCUAGAAGGAUCUGU | |
| | tracrRNA | UUUUU (SEQ ID NO: 1066) | |
| | Portion 2 | | |
| Other optimizations- | | AUCGCUUCUGAGUCCGCAUG | Not listed |
| modified tracrRNA | | GUGCGGCUAGAAGGAUCUG | |
| Portion-polyT | | (SEQ ID NO: 1067) | |
| | | OMNI-229 with sgRNA 59 | OMNI-231 with sgRNA 60 |
| crRNA: | crRNA | GUUUGAGAGCUUUGUUA (SEQ | GUUUGAGAGUAAUGUAG (SEQ |
| tracrRNA | (Repeat) | ID NO: 1082) | ID NO: 1096) |
| duplex V1 | Partial | GUUUGAGAGCUUUGU (SEQ ID | GUUUGAGAGUAAUGU (SEQ ID |
| | crRNA 1 | NO: 1083) | NO: 1097) |
| | Partial | GUUUGAGAGCUU (SEQ ID NO: | GUUUGAGAGUAA (SEQ ID NO: |
| | crRNA 2 | 1084) | 1098) |
| | Partial | GUUUGAGAGC (SEQ ID NO: | GUUUGAGAGU (SEQ ID NO: 1099) |
| | crRNA 3 | 1085) | |
| | tracrRNA | UAACAAAGCGAGUGCAAAU | UUACAUUACAAGUUCAAAU |
| | (Antirepeat) | (SEQ ID NO: 1086) | (SEQ ID NO: 1100) |
| | Partial | ACAAAGCGAGUGCAAAUA | ACAUUACAAGUUCAAAUA (SEQ |
| | tracrRNA 1 | (SEQ ID NO: 1087) | ID NO: 1101) |
| | Partial | AAGCGAGUGCAAAUA (SEQ ID | UUACAAGUUCAAAUA (SEQ ID |
| | tracrRNA 2 | NO: 1088) | NO: 1102) |
| | Partial | GCGAGUGCAAAUA (SEQ ID | ACAAGUUCAAAUA (SEQ ID NO: |
| | tracrRNA 3 | NO: 1089) | 1103) |
| TracrRNA | tracrRNA | AAGAUUAUUCGAAAUCG (SEQ | AACGAUUUAAUCGAAACC (SEQ |
| sequences | Portion 1 | ID NO: 1090) | ID NO: 1104) |
| | tracrRNA | GAUUAUUCGAAAUC (SEQ ID | CGAUUUAAUCG (SEQ ID NO: |
| | Portion 1- | NO: 1091) | 1105) |
| | partial | | |
| | tracrRNA | CCUAUACGGA (SEQ ID NO: | ACCUUUUUAGGU (SEQ ID NO: |
| | Portion 2 | 1092) | 1106) |
| | tracrRNA | CCGCAUUGUGCGGAUUUUUU | ACUGCGGUUGCAGUUUUUU |
| | Portion 3 | (SEQ ID NO: 1093) | (SEQ ID NO: 1107) |
| | tracrRNA | CCGCAUUGUGCGGA (SEQ ID | ACUGCGGUUGCAG (SEQ ID NO: |
| | Portion 3- | NO: 1094) | 1108) |
| | polyT | | |
| sgRNA | sgRNA V1 | GUUUGAGAGCUUUGUUAgaaa | GUUUGAGAGUAAUGUAGgaaaUU |
| Versions | | UAACAAAGCGAGUGCAAAUA | ACAUUACAAGUUCAAAUAACGA |
| | | AGAUUAUUCGAAAUCGCCUA | UUUAAUCGAAACCACCUUUUUA |
| | | UACGGACCGCAUUGUGCGGA | GGUACUGCGGUUGCAGUUUUUU |
| | | UUUUUU (SEQ ID NO: 1095) | (SEQ ID NO: 1109) |
| | sgRNA V2 | Not listed | GUUUGAGAGUAAUGUAGgaaaUU |
| | | | ACAUUACAAGUUCAAAUAACGA |
| | | | UUUAAUCGAAACCACCUUUCUA |
| | | | GGUACUGCGGUUGCAGUUUUUU |
| | | | (SEQ ID NO: 1110) |
| | sgRNA V2 | Not listed | ACCUUUCUAGGU (SEQ ID NO: |
| | Modified | | 1111) |
| | tracrRNA | | |
| | Portion 2 | | |
| | | | OMNI-233, 234, 235, 236 |
| | | OMNI-232 with sgRNA 61 | with sgRNA 62 |
| crRNA: | crRNA | GUUUGAGAGUAGUGUAA | GUUUGAGAGUAGUGUAA (SEQ |
| tracrRNA | (Repeat) | (SEQ ID NO: 1112) | ID NO: 1126) |
| duplex V1 | Partial | GUUUGAGAGUAGUGU (SEQ ID | GUUUGAGAGUAGUGU (SEQ ID |
| | crRNA 1 | NO: 1113) | NO: 1127) |
| | Partial | GUUUGAGAGUAG (SEQ ID NO: | GUUUGAGAGUAG (SEQ ID NO: |
| | crRNA 2 | 1114) | 1128) |
| | Partial | GUUUGAGAGU (SEQ ID NO: | GUUUGAGAGU (SEQ ID NO: 1129) |
| | crRNA 3 | 1115) | |
| | tracrRNA | UUACACAUUACGAGUUCAAA | UUACACUACAAGUUCAAAU (SEQ |
| | (Antirepeat) | U (SEQ ID NO: 1116) | ID NO: 1130) |
| | Partial | ACACAUUACGAGUUCAAAUA | ACACUACAAGUUCAAAUA (SEQ |
| | tracrRNA 1 | (SEQ ID NO: 1117) | ID NO: 1131) |
| | Partial | CAUUACGAGUUCAAAUA (SEQ | CUACAAGUUCAAAUA (SEQ ID |
| | tracrRNA 2 | ID NO: 1118) | NO: 1132) |
| | Partial | ACGAGUUCAAAUA (SEQ ID | ACAAGUUCAAAUA (SEQ ID NO: |
| | tracrRNA 3 | NO: 1119) | 1133) |
| TracrRNA | tracrRNA | AACGAUUAAAUCGAA (SEQ ID | AAAGUAAUGUUAUCACCCAUUU |
| sequences | Portion 1 | NO: 1120) | AUUUGGGAU (SEQ ID NO: 1134) |
| | tracrRNA | CGAUUAAAUCG (SEQ ID NO: | Not listed |
| | Portion 1- | 1121) | |
| | partial | | |
| | tracrRNA | ACCACCUAUAUGGU (SEQ ID | ACUGCGUGCGCAGUU (SEQ ID |
| | Portion 2 | NO: 1122) | NO: 1135) |
| | tracrRNA | ACUGCGGUUGCAGUUUUUU | GACUCGCUCAAGCGAGUCUUUU |
| | Portion 3 | (SEQ ID NO: 1123) | UU (SEQ ID NO: 1136) |
| | tracrRNA | ACUGCGGUUGCAG (SEQ ID | GACUCGCUCAAGCGAGUC (SEQ |
| | Portion 3- | NO: 1124) | ID NO: 1137) |
| | polyT | | |
| sgRNA | sgRNA V1 | GUUUGAGAGUAGUGUAAgaaa | GUUUGAGAGUAGUGUAAgaaaUU |
| Versions | | UUACACAUUACGAGUUCAAA | ACACUACAAGUUCAAAUAAAGU |
| | | UAACGAUUAAAUCGAAACCA | AAUGUUAUCACCCAUUUAUUUG |
| | | CCUAUAUGGUACUGCGGUUG | GGAUACUGCGUGCGCAGUUGAC |
| | | CAGUUUUUU (SEQ ID NO: | UCGCUCAAGCGAGUCUUUUUU |
| | | 1125) | (SEQ ID NO: 1138) |
| | | OMNI-238 with sgRNA 63 | OMNI-239 with sgRNA 64 |
| crRNA: | crRNA | GUUUGAGAGUAGUGUAA | GUUUGAGAGUAGUGUUG (SEQ |
| tracrRNA | (Repeat) | (SEQ ID NO: 1139) | ID NO: 1151) |
| duplex V1 | Partial | GUUUGAGAGUAGUGU (SEQ ID | GUUUGAGAGUAGUGU (SEQ ID |
| | crRNA 1 | NO: 1140) | NO: 1152) |
| | Partial | GUUUGAGAGUAG (SEQ ID NO: | GUUUGAGAGUAG (SEQ ID NO: |
| | crRNA 2 | 1141) | 1153) |
| | Partial | GUUUGAGAGU (SEQ ID NO: | GUUUGAGAGU (SEQ ID NO: 1154) |
| | crRNA 3 | 1142) | |
| | tracrRNA | UUACACUACGAGUUCAAAU | CUAGCACUACGAGUUCAAAU |
| | (Antirepeat) | (SEQ ID NO: 1143) | (SEQ ID NO: 1155) |
| | Partial | ACACUACGAGUUCAAAUA | GCACUACGAGUUCAAAUA (SEQ |
| | tracrRNA 1 | (SEQ ID NO: 1144) | ID NO: 1156) |
| | Partial | CUACGAGUUCAAAUA (SEQ ID | CUACGAGUUCAAAUA (SEQ ID |
| | tracrRNA 2 | NO: 1145) | NO: 1157) |
| | Partial | ACGAGUUCAAAUA (SEQ ID | ACGAGUUCAAAUA (SEQ ID NO: |
| | tracrRNA 3 | NO: 1146) | 1158) |
| TracrRNA | tracrRNA | AAAGAUCAUUCCAAAUCGUU | AAAGAUUUUUCUAAACCUCA |
| sequences | Portion 1 | CGGCUUUGCCGUUC (SEQ ID | (SEQ ID NO: 1159) |
| | | NO: 1147) | |
| | tracrRNA | Not listed | AGAUUUUUCU (SEQ ID NO: 1160) |
| | Portion 1- | | |
| | partial | | |
| | tracrRNA | GCACAAGUGUUGUGCUUUUU | GGCACGUUGGUGCCACU (SEQ ID |
| | Portion 2 | U (SEQ ID NO: 1148) | NO: 1161) |
| | tracrRNA | GCACAAGUGUUGUGC (SEQ ID | Not listed |
| | Portion 2- | NO: 1149) | |
| | polyT | | |
| | tracrRNA | Not listed | AGAAAUGCCAUUAGGCAUUUUU |
| | Portion 3 | | U (SEQ ID NO: 1162) |
| | tracrRNA | Not listed | AGAAAUGCCAUUAGGCA (SEQ ID |
| | Portion 3- | | NO: 1163) |
| | polyT | | |
| sgRNA | sgRNA V1 | GUUUGAGAGUAGUGUAAgaaa | GUUUGAGAGUAGUGUUGgaaaCU |
| Versions | | UUACACUACGAGUUCAAAUA | AGCACUACGAGUUCAAAUAAAG |
| | | AAGAUCAUUCCAAAUCGUUC | AUUUUUCUAAACCUCAGGCACG |
| | | GGCUUUGCCGUUCGCACAAG | UUGGUGCCACUAGAAAUGCCAU |
| | | UGUUGUGCUUUUUU (SEQ ID | UAGGCAUUUUUU (SEQ ID NO: |
| | | NO: 1150) | 1164) |
| | sgRNA V2 | Not listed | GUUUGAGAGUAGUGUUGgaaaCU |
| | | | AGCACUACGAGUUCAAAUAAAG |
| | | | AUUCUUCUAAACCUCAGGCACG |
| | | | UUGGUGCCACUAGAAAUGCCAU |
| | | | UAGGCAUUUUUU (SEQ ID NO: |
| | | | 1165) |
| | sgRNA V2 | Not listed | AAAGAUUCUUCUAAACCUCA |
| | Modified | | (SEQ ID NO: 1166) |
| | tracrRNA | | |
| | Portion 1 | | |
| | | | OMNI-241 or OMNI-242 |
| | | OMNI-240 with sgRNA 65 | with sgRNA 66 |
| crRNA: | crRNA | GUUUGAGAGUAGUGUUGU | GUUUGAGAGUAUUGUUG (SEQ |
| tracrRNA | (Repeat) | (SEQ ID NO: 1167) | ID NO: 1179) |
| duplex V1 | Partial | GUUUGAGAGUAGUGU (SEQ ID | GUUUGAGAGUAUUGU (SEQ ID |
| | crRNA 1 | NO: 1168) | NO: 1180) |
| | Partial | GUUUGAGAGUAG (SEQ ID NO: | GUUUGAGAGUAU (SEQ ID NO: |
| | crRNA 2 | 1169) | 1181) |
| | Partial | GUUUGAGAGU (SEQ ID NO: | GUUUGAGAGU (SEQ ID NO: 1182) |
| | crRNA 3 | 1170) | |
| | tracrRNA | AUAACACUAGAGUUCAAAU | CAACAAUACAAGUUCAAAU (SEQ |
| | (Antirepeat) | (SEQ ID NO: 1171) | ID NO: 1183) |
| | Partial | ACACUAGAGUUCAAAUA (SEQ | ACAAUACAAGUUCAAAUA (SEQ |
| | tracrRNA 1 | ID NO: 1172) | ID NO: 1184) |
| | Partial | CUAGAGUUCAAAUA (SEQ ID | AUACAAGUUCAAAUA (SEQ ID |
| | tracrRNA 2 | NO: 1173) | NO: 1185) |
| | Partial | AGAGUUCAAAUA (SEQ ID NO: | ACAAGUUCAAAUA (SEQ ID NO: |
| | tracrRNA 3 | 1174) | 1186) |
| TracrRNA | tracrRNA | AAAAAUUAUUUCAAAUCAUC | AAAAAUUUAUUCUUGUCACUUA |
| sequences | Portion 1 | CGGCAACUCCGGAA (SEQ ID | AUCGUAUUGACGAUGC (SEQ ID |
| | | NO: 1175) | NO: 1187) |
| | tracrRNA | GUACAGUGUGUACAUAAUUA | GGAAAUCUCUCGGAAGAGAGAU |
| | Portion 2 | ACCCUUCUUUUUU (SEQ ID | UUUUU (SEQ ID NO: 1188) |
| | | NO: 1176) | |
| | tracrRNA | GUACAGUGUGUACAUAAUUA | GGAAAUCUCUCGGAAGAGAGA |
| | Portion 2- | ACCCUUC (SEQ ID NO: 1177) | (SEQ ID NO: 1189) |
| | polyT | | |
| sgRNA | sgRNA V1 | GUUUGAGAGUAGUGUUGUgaa | GUUUGAGAGUAUUGUUGgaaaCA |
| Versions | | aAUAACACUAGAGUUCAAAU | ACAAUACAAGUUCAAAUAAAAA |
| | | AAAAAUUAUUUCAAAUCAUC | UUUAUUCUUGUCACUUAAUCGU |
| | | CGGCAACUCCGGAAGUACAG | AUUGACGAUGCGGAAAUCUCUC |
| | | UGUGUACAUAAUUAACCCUU | GGAAGAGAGAUUUUUU (SEQ ID |
| | | CUUUUUU (SEQ ID NO: 1178) | NO: 1190) |
| | | OMNI-241 or OMNI-242 | |
| | | with sgRNA 67 | OMNI-243 with sgRNA 68 |
| crRNA: | crRNA | GUUUGAGAGUAUUGUUG | GUUUGAGAGUCGUGUAA (SEQ ID |
| tracrRNA | (Repeat) | (SEQ ID NO: 1191) | NO: 1203) |
| duplex V1 | Partial | GUUUGAGAGUAUUGU (SEQ ID | GUUUGAGAGUCGUGU (SEQ ID |
| | crRNA 1 | NO: 1192) | NO: 1204) |
| | Partial | GUUUGAGAGUAU (SEQ ID NO: | GUUUGAGAGUCG (SEQ ID NO: |
| | crRNA 2 | 1193) | 1205) |
| | Partial | GUUUGAGAGU (SEQ ID NO: | GUUUGAGAGU (SEQ ID NO: 1206) |
| | crRNA 3 | 1194) | |
| | tracrRNA | CAACAAUACAAGUUCAAAU | UUACACGACAAGUUCAAAU (SEQ |
| | (Antirepeat) | (SEQ ID NO: 1195) | ID NO: 1207) |
| | Partial | ACAAUACAAGUUCAAAUA | ACACGACAAGUUCAAAUA (SEQ |
| | tracrRNA 1 | (SEQ ID NO: 1196) | ID NO: 1208) |
| | Partial | AUACAAGUUCAAAUA (SEQ ID | CGACAAGUUCAAAUA (SEQ ID |
| | tracrRNA 2 | NO: 1197) | NO: 1209) |
| | Partial | ACAAGUUCAAAUA (SEQ ID | ACAAGUUCAAAUA (SEQ ID NO: |
| | tracrRNA 3 | NO: 1198) | 1210) |
| TracrRNA | tracrRNA | AAAAAUUUAUUCUUGUCACU | AAGCUUAGUGGCAUCUGACUUU |
| sequences | Portion 1 | UAAUCGUAUUGACGAUGCU | AGCUGCUAUUUAGCGACUUC |
| | | (SEQ ID NO: 1199) | (SEQ ID NO: 1211) |
| | tracrRNA | GAAAUCUCUCGGAAGAGAGA | ACCGCUCUUGCGGUU (SEQ ID |
| | Portion 2 | UUUUUU (SEQ ID NO: 1200) | NO: 1212) |
| | tracrRNA | GAAAUCUCUCGGAAGAGAGA | Not listed |
| | Portion 2- | (SEQ ID NO: 1201) | |
| | polyT | | |
| | tracrRNA | Not listed | AGCCCCGUGUGGGGCUUUUUU |
| | Portion 3 | | (SEQ ID NO: 1213) |
| | tracrRNA | Not listed | AGCCCCGUGUGGGGC (SEQ ID |
| | Portion 3- | | NO: 1214) |
| | polyT | | |
| sgRNA | sgRNA V1 | GUUUGAGAGUAUUGUUGgaaa | GUUUGAGAGUCGUGUAAgaaaUU |
| Versions | | CAACAAUACAAGUUCAAAUA | ACACGACAAGUUCAAAUAAGCU |
| | | AAAAUUUAUUCUUGUCACUU | UAGUGGCAUCUGACUUUAGCUG |
| | | AAUCGUAUUGACGAUGCUGA | CUAUUUAGCGACUUCACCGCUC |
| | | AAUCUCUCGGAAGAGAGAUU | UUGCGGUUAGCCCCGUGUGGGG |
| | | UUUU (SEQ ID NO: 1202) | CUUUUUU (SEQ ID NO: 1215) |
| | | OMNI-244 with sgRNA 69 | OMNI-245 with sgRNA 70 |
| crRNA: | crRNA | GUUUGAGAGUCUUGUUA (SEQ | GUUUGAGAGUUAUGUUA (SEQ |
| tracrRNA | (Repeat) | ID NO: 1216) | ID NO: 1228) |
| duplex V1 | Partial | GUUUGAGAGUCUUGU (SEQ ID | GUUUGAGAGUUAUGU (SEQ ID |
| | crRNA 1 | NO: 1217) | NO: 1229) |
| | Partial | GUUUGAGAGUCU (SEQ ID NO: | GUUUGAGAGUUA (SEQ ID NO: |
| | crRNA 2 | 1218) | 1230) |
| | Partial | GUUUGAGAGU (SEQ ID NO: | GUUUGAGAGU (SEQ ID NO: 1231) |
| | crRNA 3 | 1219) | |
| | tracrRNA | UAAUAAGACGAGUUCAAAU | UAACAUAACGAGUUCAAAU |
| | (Antirepeat) | (SEQ ID NO: 1220) | (SEQ ID NO: 1232) |
| | Partial | AUAAGACGAGUUCAAAUA | ACAUAACGAGUUCAAAUA (SEQ |
| | tracrRNA 1 | (SEQ ID NO: 1221) | ID NO: 1233) |
| | Partial | AGACGAGUUCAAAUA (SEQ ID | UAACGAGUUCAAAUA (SEQ ID |
| | tracrRNA 2 | NO: 1222) | NO: 1234) |
| | Partial | ACGAGUUCAAAUA (SEQ ID | ACGAGUUCAAAUA (SEQ ID NO: |
| | tracrRNA 3 | NO: 1223) | 1235) |
| TracrRNA | tracrRNA | AAAAAUUUAUUCUGAUCACU | AAAUGUUAUUCUAAGCAUUCUU |
| sequences | Portion 1 | UAUCGCAUUUGCGGUGA (SEQ | CAGCGUGAAGAGCAU (SEQ ID |
| | | ID NO: 1224) | NO: 1236) |
| | tracrRNA | Not listed | UGUUAUUCUAAGCA (SEQ ID NO: |
| | Portion 1- | | 1237) |
| | partial | | |
| | tracrRNA | AAUAAACUCCCGAACAAGCG | GAAAAGGCGAAAGCCUUUUUU |
| | Portion 2 | GGAGUUUAUUUUUU (SEQ ID | (SEQ ID NO: 1238) |
| | | NO: 1225) | |
| | tracrRNA | AAUAAACUCCCGAACAAGCG | GAAAAGGCGAAAGCC (SEQ ID |
| | Portion 2- | GGAGUUUA (SEQ ID NO: 1226) | NO: 1239) |
| | polyT | | |
| sgRNA | sgRNA V1 | GUUUGAGAGUCUUGUUAgaaa | GUUUGAGAGUUAUGUUAgaaaUA |
| Versions | | UAAUAAGACGAGUUCAAAUA | ACAUAACGAGUUCAAAUAAAUG |
| | | AAAAUUUAUUCUGAUCACUU | UUAUUCUAAGCAUUCUUCAGCG |
| | | AUCGCAUUUGCGGUGAAAUA | UGAAGAGCAUGAAAAGGCGAAA |
| | | AACUCCCGAACAAGCGGGAG | GCCUUUUUU (SEQ ID NO: 1240) |
| | | UUUAUUUUUU (SEQ ID NO: | |
| | | 1227) | |
| | | OMNI-247 or OMNI-250 | |
| | | with sgRNA 71 | OMNI-254 with sgRNA 72 |
| crRNA: | crRNA | GUUUGAGUGUAAUGUA (SEQ | GUUUGCUAGGUG (SEQ ID NO: |
| tracrRNA | (Repeat) | ID NO: 1241) | 1253) |
| duplex V1 | Partial | GUUUGAGUGUAAUGU (SEQ ID | GUUUGCUAGGUGUGU (SEQ ID |
| | crRNA 1 | NO: 1242) | NO: 1254) |
| | Partial | GUUUGAGUGUAA (SEQ ID NO: | GUUUGCUAGGUG (SEQ ID NO: |
| | crRNA 2 | 1243) | 1255) |
| | Partial | GUUUGAGUGU (SEQ ID NO: | GUUUGCUAGG (SEQ ID NO: 1256) |
| | crRNA 3 | 1244) | |
| | tracrRNA | UACAUUACAAAGUUCAAAU | CACAGCUGCGUGCAAAU (SEQ ID |
| | (Antirepeat) | (SEQ ID NO: 1245) | NO: 1257) |
| | Partial | ACAUUACAAAGUUCAAAUA | ACACACAGCUGCGUGCA (SEQ ID |
| | tracrRNA 1 | (SEQ ID NO: 1246) | NO: 1258) |
| | Partial | UUACAAAGUUCAAAUA (SEQ | CACAGCUGCGUGCA (SEQ ID NO: |
| | tracrRNA 2 | ID NO: 1247) | 1259) |
| | Partial | ACAAAGUUCAAAUA (SEQ ID | CAGCUGCGUGCA (SEQ ID NO: |
| | tracrRNA 3 | NO: 1248) | 1260) |
| TracrRNA | tracrRNA | AAGCUUUAAGCGAAAUCAUA | AAGUCACUUUGUGGCGUAUCCA |
| sequences | Portion 1 | (SEQ ID NO: 1249) | UAACU (SEQ ID NO: 1261) |
| | tracrRNA | GCUUUAAGC | GUCACUUUGUGGC (SEQ ID NO: |
| | Portion 1- | | 1262) |
| | partial | | |
| | tracrRNA | GAGAAGCAGUGCUUCUCAUU | CCCCAUUGGAACGGGGCUUUUU |
| | Portion 2 | UUUUU (SEQ ID NO: 1250) | U (SEQ ID NO: 1263) |
| | tracrRNA | GAGAAGCAGUGCUUCUCA | CCCCAUUGGAACGGGGC (SEQ ID |
| | Portion 2- | (SEQ ID NO: 1251) | NO: 1264) |
| | polyT | | |
| sgRNA | sgRNA V1 | GUUUGAGUGUAAUGUAgaaaU | GUUUGCUAGGUGgaaaCACAGCU |
| Versions | | ACAUUACAAAGUUCAAAUAA | GCGUGCAAAUAAGUCACUUUGU |
| | | GCUUUAAGCGAAAUCAUAGA | GGCGUAUCCAUAACUCCCCAUU |
| | | GAAGCAGUGCUUCUCAUUUU | GGAACGGGGCUUUUUU (SEQ ID |
| | | UUU (SEQ ID NO: 1252) | NO: 1265) |
| | | OMNI-256 with sgRNA 73 | OMNI-257 with sgRNA 74 |
| crRNA: | crRNA | GUUUUAGAGCGAUGUAA (SEQ | GUUUUAGAUCUAUGUCA (SEQ ID |
| tracrRNA | (Repeat) | ID NO: 1266) | NO: 1281) |
| duplex V1 | Partial | GUUUUAGAGCGAUGU (SEQ ID | GUUUUAGAUCUAUGU (SEQ ID |
| | crRNA 1 | NO: 1267) | NO: 1282) |
| | Partial | GUUUUAGAGCGA (SEQ ID NO: | GUUUUAGAUCUA (SEQ ID NO: |
| | crRNA 2 | 1268) | 1283) |
| | Partial | GUUUUAGAGC (SEQ ID NO: | GUUUUAGAUC (SEQ ID NO: 1284) |
| | crRNA 3 | 1269) | |
| | tracrRNA | UUACAUCGUCAAGUUAAAAU | UGACAUAGAGAGUUAAAAU |
| | (Antirepeat) | (SEQ ID NO: 1270) | (SEQ ID NO: 1285) |
| | Partial | ACAUCGUCAAGUUAAAAUA | ACAUAGAGAGUUAAAAUA (SEQ |
| | tracrRNA 1 | (SEQ ID NO: 1271) | ID NO: 1286) |
| | Partial | UCGUCAAGUUAAAAUA (SEQ | UAGAGAGUUAAAAUA (SEQ ID |
| | tracrRNA 2 | ID NO: 1272) | NO: 1287) |
| | Partial | GUCAAGUUAAAAUA (SEQ ID | GAGAGUUAAAAUA (SEQ ID NO: |
| | tracrRNA 3 | NO: 1273) | 1288) |
| TracrRNA | tracrRNA | AAAUACUACACUAUCUGCCC | AAAGGUUUUACCCUAAAU (SEQ |
| sequences | Portion 1 | UUUCGGGGGC (SEQ ID NO: | ID NO: 1289) |
| | | 1274) | |
| | tracrRNA | Not listed | AGGUUUUACCCU (SEQ ID NO: |
| | Portion 1- | | 1290) |
| | partial | | |
| | tracrRNA | GUCGCCUCAGGGGCGACAUU | ACUCACGUAUGUGUAGU (SEQ ID |
| | Portion 2 | UUUU (SEQ ID NO: 1275) | NO: 1291) |
| | tracrRNA | GUCGCCUCAGGGGCGACA | Not listed |
| | Portion 2- | (SEQ ID NO: 1276) | |
| | polyT | | |
| | tracrRNA | Not listed | GGACUGUUAGCAGUCCUUUUUU |
| | Portion 3 | | (SEQ ID NO: 1292) |
| | tracrRNA | Not listed | GGACUGUUAGCAGUCC (SEQ ID |
| | Portion 3- | | NO: 1293) |
| | polyT | | |
| sgRNA | sgRNA V1 | GUUUUAGAGCGAUGUAAgaaa | GUUUUAGAUCUAUGUCAgaaaUG |
| Versions | | UUACAUCGUCAAGUUAAAAU | ACAUAGAGAGUUAAAAUAAAGG |
| | | AAAUACUACACUAUCUGCCC | UUUUACCCUAAAUACUCACGUA |
| | | UUUCGGGGGCGUCGCCUCAG | UGUGUAGUGGACUGUUAGCAGU |
| | | GGGCGACAUUUUUU (SEQ ID | CCUUUUUU (SEQ ID NO: 1294) |
| | | NO: 1277) | |
| | sgRNA V2 | GUUCUAGAGCGAUGUAAgaaa | GUUCUAGAUCUAUGUCAgaaaUG |
| | | UUACAUCGUCAAGUUAGAAU | ACAUAGAGAGUUAGAAUAAAGG |
| | | AAAUACUACACUAUCUGCCC | UUUCACCCUAAAUACUCACGUA |
| | | UUUCGGGGGCGUCGCCUCAG | UGUGUAGUGGACUGUUAGCAGU |
| | | GGGCGACAUUUUUU (SEQ ID | CCUUUUUU (SEQ ID NO: 1295) |
| | | NO: 1278) | |
| | sgRNA V2 | GUUCUAGAGCGAUGUAA (SEQ | GUUCUAGAUCUAUGUCA (SEQ ID |
| | crRNA | ID NO: 1279) | NO: 1296) |
| | (Repeat) | | |
| | sgRNA V2 | UUACAUCGUCAAGUUAGAAU | UGACAUAGAGAGUUAGAAU |
| | tracrRNA | (SEQ ID NO: 1280) | (SEQ ID NO: 1297) |
| | (Antirepeat) | | |
| | sgRNA V2 | Not listed | AAAGGUUUCACCCUAAAU (SEQ |
| | Modified | | ID NO: 1298) |
| | tracrRNA | | |
| | Portion 1 | | |
| | | OMNI-260 with sgRNA 75 | OMNI-262 with sgRNA 76 |
| crRNA: | crRNA | GUUUUAGUUCUCUGAUGG | GUUUUGGUUCUCUGAUGG (SEQ |
| tracrRNA | (Repeat) | (SEQ ID NO: 1299) | ID NO: 1315) |
| duplex V1 | Partial | GUUUUAGUUCUCUGA (SEQ ID | GUUUUGGUUCUCUGA (SEQ ID |
| | crRNA 1 | NO: 1300) | NO: 1316) |
| | Partial | GUUUUAGUUCUC (SEQ ID NO: | GUUUUGGUUCUC (SEQ ID NO: |
| | crRNA 2 | 1301) | 1317) |
| | Partial | GUUUUAGUUC (SEQ ID NO: | GUUUUGGUUC (SEQ ID NO: 1318) |
| | crRNA 3 | 1302) | |
| | tracrRNA | CCAUCAGUAAGUUCUAAGAU | CCAUCAGAAGUUCUAAGAU (SEQ |
| | (Antirepeat) | (SEQ ID NO: 1303) | ID NO: 1319) |
| | Partial | UCAGUAAGUUCUAAGAUA | UCAGAAGUUCUAAGAUA (SEQ ID |
| | tracrRNA 1 | (SEQ ID NO: 1304) | NO: 1320) |
| | Partial | GUAAGUUCUAAGAUA (SEQ ID | GAAGUUCUAAGAUA (SEQ ID NO: |
| | tracrRNA 2 | NO: 1305) | 1321) |
| | Partial | GUUCUAAGAUA (SEQ ID NO: | GUUCUAAGAUA (SEQ ID NO: |
| | tracrRNA 3 | 1306) | 1322) |
| TracrRNA | tracrRNA | AAGGCAUUAUGCC (SEQ ID | AAGGCUUUACGCCGCAGGGU |
| sequences | Portion 1 | NO: 1307) | (SEQ ID NO: 1323) |
| | tracrRNA | GGCAUUAUGCC (SEQ ID NO: | GGCUUUACGCC (SEQ ID NO: |
| | Portion 1- | 1308) | 1324) |
| | partial | | |
| | tracrRNA | GAGGGGUAUGGCGGUAACCU | AUGGUGGUAACCCGAAUAUUCC |
| | Portion 2 | CAUAAUCCUCCGCCUC (SEQ | ACCAUUUUUU (SEQ ID NO: 1325) |
| | | ID NO: 1309) | |
| | tracrRNA | | AUGGUGGUAACCCGAAUAUUCC |
| | Portion 2- | | ACCA (SEQ ID NO: 1326) |
| | polyT | | |
| | tracrRNA | AAAACGCAUCGGAAACGGUG | Not listed |
| | Portion 3 | CGUUUUUU (SEQ ID NO: 1310) | |
| | tracrRNA | AAAACGCAUCGGAAACGGUG | Not listed |
| | Portion 3- | CG (SEQ ID NO: 1311) | |
| | polyT | | |
| sgRNA | sgRNA V1 | GUUUUAGUUCUCUGAUGGgaa | GUUUUGGUUCUCUGAUGGgaaaC |
| Versions | | aCCAUCAGUAAGUUCUAAGAU | CAUCAGAAGUUCUAAGAUAAGG |
| | | AAGGCAUUAUGCCGAGGGGU | CUUUACGCCGCAGGGUAUGGUG |
| | | AUGGCGGUAACCUCAUAAUC | GUAACCCGAAUAUUCCACCAUU |
| | | CUCCGCCUCAAAACGCAUCGG | UUUU (SEQ ID NO: 1327) |
| | | AAACGGUGCGUUUUUU (SEQ | |
| | | ID NO: 1312) | |
| | sgRNA V2 | GUCUUAGUUCUCUGAUGGgaaa | GUCUUGGUUCUCUGAUGGgaaaCC |
| | | CCAUCAGUAAGUUCUAAGAU | AUCAGAAGUUCUAAGAUAAGGC |
| | | AAGGCAUUAUGCCGAGGGGU | UUUACGCCGCAGGGUAUGGUGG |
| | | AUGGCGGUAACCUCAUAAUC | UAACCCGAAUAUUCCACCAUUU |
| | | CUCCGCCUCAAAACGCAUCGG | UUU (SEQ ID NO: 1328) |
| | | AAACGGUGCGUUUUUU (SEQ | |
| | | ID NO: 1313) | |
| | sgRNA V2 | GUCUUAGUUCUCUGAUGG | GUCUUGGUUCUCUGAUGG (SEQ |
| | crRNA | (SEQ ID NO: 1314) | ID NO: 1329) |
| | (Repeat) | | |
| | | OMNI-117 with sgRNA 77 | OMNI-117 with sgRNA 78 |
| crRNA: | crRNA | GUUUGAGAGUAUUGUU (SEQ | GUUUGAGAGUAUUGUUAUU |
| tracrRNA | (Repeat) | ID NO: 1330) | (SEQ ID NO: 1346) |
| duplex V1 | Partial | GUUUGAGAGUAUUGU (SEQ ID | GUUUGAGAGUAUUGU (SEQ ID |
| | crRNA 1 | NO: 1331) | NO: 1347) |
| | Partial | GUUUGAGAGUAU (SEQ ID NO: | GUUUGAGAGUAU (SEQ ID NO: |
| | crRNA 2 | 1332) | 1348) |
| | Partial | GUUUGAGAGU (SEQ ID NO: | GUUUGAGAGU (SEQ ID NO: 1349) |
| | crRNA 3 | 1333) | |
| | tracrRNA | AACAAUCGUUCAAAU (SEQ ID | AAUAACAAUCGUUCAAAU (SEQ |
| | (Antirepeat) | NO: 1334) | ID NO: 1350) |
| | Partial | ACAAUCGUUCAAAUA (SEQ ID | ACAAUCGUUCAAAUA (SEQ ID |
| | tracrRNA 1 | NO: 1335) | NO: 1351) |
| | Partial | AUCGUUCAAAUA (SEQ ID NO: | AUCGUUCAAAUA (SEQ ID NO: |
| | tracrRNA 2 | 1336) | 1352) |
| | Partial | CGUUCAAAUA (SEQ ID NO: | CGUUCAAAUA (SEQ ID NO: 1353) |
| | tracrRNA 3 | 1337) | |
| TracrRNA | tracrRNA | AAGGUUUUACCUUAAGC (SEQ | AAGGUUUUACCUUAAGC (SEQ ID |
| sequences | Portion 1 | ID NO: 1338) | NO: 1354) |
| | tracrRNA | AAGGUUUUACCUU (SEQ ID | AAGGUUUUACCUU (SEQ ID NO: |
| | Portion 1- | NO: 1339) | 1355) |
| | partial | | |
| | tracrRNA | AUCCUAUUGGAUC (SEQ ID | AUCCUAUUGGAUC (SEQ ID NO: |
| | Portion 2 | NO: 1340) | 1356) |
| | tracrRNA | AGUCGACUAAUCAGAGUCGA | AGUCGACUAACCAGAGUCGACU |
| | Portion 3 | CUAUUUUUU (SEQ ID NO: | AUUUUUU (SEQ ID NO: 1357) |
| | | 1341) | |
| | tracrRNA | AGUCGACUAAUCAGAGUCGA | AGUCGACUAACCAGAGUCGACU |
| | Portion 3- | CUA (SEQ ID NO: 1342) | A (SEQ ID NO: 1358) |
| | polyT | | |
| sgRNA | sgRNA V1 | GUUUGAGAGUAUUGUUgaaaA | GUUUGAGAGUAUUGUUAUUgaaa |
| Versions | | ACAAUCGUUCAAAUAAGGUU | AAUAACAAUCGUUCAAAUAAGG |
| | | UUACCUUAAGCAUCCUAUUG | UUUUACCUUAAGCAUCCUAUUG |
| | | GAUCAGUCGACUAAUCAGAG | GAUCAGUCGACUAACCAGAGUC |
| | | UCGACUAUUUUUU (SEQ ID | GACUAUUUUUU (SEQ ID NO: |
| | | NO: 1343) | 1359) |
| | sgRNA V2 | GUUUGAGAGUAUUGUUgaaaA | Not listed |
| | | ACAAUCGUUCAAAUAAGGUA | |
| | | UUACCUUAAGCAUCCUAUUG | |
| | | GAUCAGUCGACUAAUCAGAG | |
| | | UCGACUAUUUUUU (SEQ ID | |
| | | NO: 1344) | |
| | sgRNA V2 | AAGGUAUUACCUUAAGC (SEQ | Not listed |
| | Modified | ID NO: 1345) | |
| | tracrRNA | | |
| | Portion 1 | | |

TABLE 3
Summary of OMNI Nuclease PAMs

| | Permissive | Exemplary | Exemplary |
|---|---|---|---|
| Nuclease | PAM | PAM #1 | PAM #2 |
| OMNI-117 | NNNANNNN | NRWANYNN | NNAANNNN |
| OMNI-140 | NNRNYMYN | NNRRCMYN | NNRDCMYN |
| OMNI-150 | NVYACNNN | SVTACNNN | NVTAHNNN |
| OMNI-151 | NNGNYNTN | NNGMYNTN | NBGHTNNN |
| OMNI-152 | NBRTTTNN | NCRTTTNN | NNNTTTNN |
| OMNI-153 | NRRVGMNN | NRRVGMNN | NRRVGANN |
| OMNI-154 | NRRRANNN | NRAAAKNN | NRRANNNN |
| OMNI-155 | NRRRANNN | NRAAAKNN | NRRANNNN |
| OMNI-156 | NRRDNNNN | NRRRNANN | NRRRNNNN |
| OMNI-157 | NRRRDNNN | NRRADANN | NRRRDNNN |
| OMNI-158 | NNRYNCYN | NNRYNCYN | NNRCNCYN |
| OMNI-160 | NVRNNCNN | NRRNRCNN | NNRNRCNN |
| OMNI-161 | NNAAVNNN | NNAAATNN | NNAAAYNN |
| OMNI-162 | NNRTWYAN | NNRTWYAN | NNRTWYAN |
| OMNI-163 | NNAACBNN | NNAACSNN | NNAANNNN |
| OMNI-164 | NNRACNNN | NNRACNNN | NNRACNNN |
| OMNI-165 | NNAAARNN | HAAAARNN | NNAAAANN |
| OMNI-167 | NRRACNNN | NRRACNNN | NRRNCNNN |
| OMNI-168 | NRYTTTTN | NRYTTTTN | NNYTTTNN |
| OMNI-169 | NNRCCRNN | NNGCCRNN | NNRCCRNN |
| OMNI-170 | NNRCCDNN | CNRCCDWN | NNRCCDDN |
| OMNI-171 | NNRCNNNN | NNACNNNN | NNACNNNN |
| OMNI-172 | Not listed | NNRCNNNN | NYACNNNN |
| OMNI-173 | NNRNRKNN | NNAAATYN | NNAHRYNN |
| OMNI-174 | NNRCNNNN | NNACGNNN | NNRCNNNN |
| OMNI-175 | NNRCNNNN | NNACNNNN | NNRCVNNN |
| OMNI-176 | NNAAVTNN | NNAAATNN | NNAANNNN |
| OMNI-177 | NVRTTNNN | SRRTTNNN | NRRTTNNN |
| OMNI-180 | NRRNABNN | NARTAYGN | NARNANNN |
| OMNI-181 | NATNCMBN | NATNCCBN | NATNCCNN |
| OMNI-182 | NRRRAYNN | NRRRAYNN | NRRRMYNN |
| OMNI-183 | NNACNNNN | NNACVNNN | NNAMNNNN |
| OMNI-184 | NNRDVTNN | NNRDRINN | NNANNNNN |
| OMNI-185 | NNRMNNNN | NNRMNNNN | NNGMNNNN |
| OMNI-186 | NNADVNNN | NNAWAYNN | NNAWVNNN |
| OMNI-187 | NNRCCCNN | NNGCCCNN | NNRCNCNN |
| OMNI-188 | SNRCHCNN | SNGCCCNN | NNGCHCNN |
| OMNI-191 | NVVNCNNN | NVRNCRNN | NVRNCNNN |
| OMNI-192 | NNRNCNNN | NRRNCNNN | NVRNCNNN |
| OMNI-193 | NRRNCNNN | NRRNCNNN | NRRNCNNN |
| OMNI-194 | NKARMMNN | NGAAAANN | NGAAANNN |
| OMNI-195 | NNAAMGNN | NNAAMGNN | NNAAMNNN |
| OMNI-196 | NVRNCNNN | NVRNCNNN | NRRHCNNN |
| OMNI-197 | NVRHARNN | NRRHAANN | NRRHAAGN |
| OMNI-198 | NRWCCHNN | YATCCCBN | NATCCNNN |
| OMNI-200 | NNRRANNN | NRRRANAN | NRRAANNN |
| OMNI-201 | NNAAMGNN | NNAAMGNN | NNAAMNNN |
| OMNI-203 | SRAHVYNN | SRAYVCNN | CRAYNCNN |
| OMNI-205 | NNAYVNNN | YNAYVNNN | YNAYNNNN |
| OMNI-206 | NNATMYNN | NNATAYNN | NNANAYNN |
| OMNI-207 | NNRANNNN | NNAAAGNN | NNAANNNN |
| OMNI-208 | NNAAANNN | NNAAATNN | NNAAANNN |
| OMNI-209 | NNARVTNN | NNARVTNN | NNAAMNNN |
| OMNI-211 | NNNNCCNN | NNNNCCNN | NNNHCCNN |
| OMNI-212 | NNAANTNN | NNAARTNN | NNAANNNN |
| OMNI-213 | NGHCDBN | NGMHCGBN | NGHHCGNN |
| OMNI-214 | NRRNHNNN | NRRTMNNN | NRGNMNNN |
| OMNI-215 | NVNNCTNN | NVTGCTGN | NVYGCTNN |
| OMNI-216 | NARNNNNN | NARKNCNN | NARDNNNN |
| OMNI-217 | NNRYTTNN | NNRCTTNN | NNRYTTNN |
| OMNI-219 | NNNNNCNN | NNNNNCRN | NNNHACRN |
| OMNI-220 | NNNNNNHA | NNNNNYAA | NNNNNNWA |
| OMNI-222 | NNAAVNNN | NNAAATNN | NNAAVNNN |
| OMNI-223 | NNAARNNN | NNAAAYNN | NNAAANNN |
| OMNI-226 | NDNADTNN | NRAADTNN | NRNANTNN |
| OMNI-227 | NNRAHNNN | NRRACNNN | NVVAHNNN |
| OMNI-229 | NARAANNN | NARAANNN | NRRANNNN |
| OMNI-231 | NNNRCNNN | NRVRCNNN | NVNRCNNN |
| OMNI-232 | NVVRCNAN | NVVACNAN | NVVRCNNN |
| OMNI-233 | NNARANNN | NNAAANNN | NNAANNNN |
| OMNI-234 | NNARNNNN | NNARANNN | NNAANNNN |
| OMNI-235 | NNARANNN | NNAAANNN | NNAANNNN |
| OMNI-236 | NNARANNN | NNAAANNN | NNAANNNN |
| OMNI-238 | NNYAANNN | NNYAAYNN | NNYAMNNN |
| OMNI-239 | NNRCCNNN | NRRCCNNN | NNRCCNNN |
| OMNI-240 | NNCRMTHN | NRCRMTHN | NNCRMTNN |
| OMNI-241 | NVDAAANN | NVAAAANN | NNRAAANN |
| OMNI-242 | NVNRCTNN | NVWRCTNN | NNNRCTNN |
| OMNI-243 | NRAAANNN | NRAAANNN | NRRRNNNN |
| OMNI-244 | NNNVCCRN | NNNVCCAN | NNNVCCNN |
| OMNI-245 | NRCAAWNN | NRCAAWCN | NRCAANNN |
| OMNI-247 | NRNVCNNN | NRNRCNNN | NRRRCNNN |
| OMNI-250 | NRNVCNNN | NRRRCNNN | NRNRCNNN |
| OMNI-254 | NRVCNCNN | NRVCNCCN | NRRCNNNN |
| OMNI-256 | NGGNNNNN | NGGNNNNN | NGGNNNNN |
| OMNI-257 | NVRAAAYN | NRRAAACN | NNRAAANN |
| OMNI-260 | NNRGGGNN | NNGGGGNN | NNGGNNNN |
| OMNI-262 | NNNVKWCN | NNNVTACN | NNNVTAHN |

TABLE 4
Plasmids and Constructs

| Plasmid | Purpose | Elements | Example |
|---|---|---|---|
| pET9a | Expressing OMNI | T7 promoter HA Tag-Linker- | pET9a-OMNI-140 |
| | polypeptide in the | OMNI ORF (Human | (SEQ ID NO: 1360) |
| | bacterial system | optimized) -SV40 NLS- | |
| | | 8XHisTag -T7 terminator | |
| pbShuttle | Expressing OMNI | U6 promotor - T7promoter - | pShuttle Guide-T2- |
| Guide T2 | sgRNA in the | T2 spacer sgRNA scaffold - | OMNI-140 V1 |
| | bacterial system | T7 terminator | (SEQ ID NO: 1361) |
| pbPOS T2 | Bacterial/TXTL | T2 protospacer - 8N PAM | pbPOS T2 library |
| library | depletion assay | library - chloramphenicol | (SEQ ID NO: 1362) |
| | | acetyltransferase | |

TABLE 4
Appendix - Details of construct elements

| Element | Protein Sequence | DNA sequence |
|---|---|---|
| HA Tag | SEQ ID NO: 1363 | SEQ ID NO: 1364 |
| NLS | SEQ ID NO: 1365 | SEQ ID NO: 1366 |
| P2A | SEQ ID NO: 1367 | SEQ ID NO: 1368 |
| mCherry | SEQ ID NO: 1369 | SEQ ID NO: 1370 |

TABLE 5
Activity of OMNIs in human cells on endogenous genomic targets
OMNI Nuclease activity in endogenous context in mammalian cells: OMNI nucleases
were expressed in a mammalian cell system (HeLa cells) by DNA transfection together
with an sgRNA-expressing plasmid. Cell lysates were used for site-specific genomic
DNA amplification and NGS. The percentage of indels was measured and analyzed to
determine the editing level. OMNI nuclease expression was measured by flow cytometry
of an mCherry reporter (data not shown). All tests were done in triplicate and the
average editing levels and standard deviations were calculated. OMNI nuclease-only
(i.e. no guide) transfected cells served as a negative control, and no editing was
observed (data not shown).

| | | | | | Max |
|---|---|---|---|---|---|
| | | | | | Editing |
| | Gene | Corresponding | | | Activity |
| Nuclease | Target | Spacer Name | Spacer Sequence | PAM | Mean |
| OMNI-156 | SAMD9L | g97_REF | UUGACCACUUCAAUGUAAUGAU | CAAAAAGT | 12.00 |
| | | | (SEQ ID NO: 1373) | | |
| OMNI-160 | SAMD9L | g119_REF | UCAUUACAUUGAAGUGGUCAAU | GAAGGCAG | 3.00 |
| | | | (SEQ ID NO: 1374) | | |
| OMNI-165 | PDCD1 | S74_REF | CAUGGGGCUCAUCCCAUCCUUA | GGAAAACT | 3.00 |
| | | | (SEQ ID NO: 1375) | | |
| OMNI-169 | CXCR4 | s77_REF | GCUCCUCCGGUGUGUGGGUCUC | TTGCCATC | 62.00 |
| | | | (SEQ ID NO: 1376) | | |
| OMNI-169 | EMX | S14_REF | CUGCCUGCCUGGGCGGGCCCGC | CCGCCACC | 21.00 |
| | | | (SEQ ID NO: 1377) | | |
| OMNI-169 | TRAC | S34_REF | UCCAGAACCCUGACCCUGCCGU | GTACCAGC | 16.00 |
| | | | (SEQ ID NO: 1378) | | |
| OMNI-169 | CXCR4 | s76_REF | CUCAGUUUCUUCUGGUAACCCA | TGACCAGG | 5.00 |
| | | | (SEQ ID NO: 1379) | | |
| OMNI-170 | CXCR4 | s184_REF | CAGCAGGAGGGCAGGGAUCCAG | ACGCCAAC | 19.00 |
| | | | (SEQ ID NO: 1380) | | |
| OMNI-170 | TRAC | S34_REF | UCCAGAACCCUGACCCUGCCGU | GTACCAGC | 12.00 |
| | | | (SEQ ID NO: 1381) | | |
| OMNI-170 | CXCR4 | s77_REF | GCUCCUCCGG UGUGUGGGUCUC | TTGCCATC | 11.00 |
| | | | (SEQ ID NO: 1382) | | |
| OMNI-170 | EMX | S15_REF | CCCUAGAGGC UGGGUCUCUGGA | CCGCCAAG | 8.00 |
| | | | (SEQ ID NO: 1383) | | |
| OMNI-170 | SAMD9L | g153_ALT | UCCAAGGAACAAAGAGCCUUUG | GTGCCAAA | 5.00 |
| | | | (SEQ ID NO: 1384) | | |
| OMNI-171 | TRAC | S34_REF | UCCAGAACCCUGACCCUGCCGU | GTACCAGC | 14.00 |
| | | | (SEQ ID NO: 1385) | | |
| OMNI-171 | ELANE | g153_REF | UGUCCCUGUGGCCUCUGGGGCU | TGACACCC | 10.00 |
| | | | (SEQ ID NO: 1386) | | |
| OMNI-173 | TRAC | s101_REF | AACAGUGCUGUGGCCUGGAGCA | ACAAATCT | 72.00 |
| | | | (SEQ ID NO: 1387) | | |
| OMNI-173 | TRAC | S14_REF | UACACGGCAGGGUCAGGGUUCU | GGATAT | 41.00 |
| | | | (SEQ ID NO: 1388) | | |
| OMNI-173 | SAMD9L | g84_ALT | ACCGUCCAAAACAGAACACCAA | AAAAATCC | 25.00 |
| | | | (SEQ ID NO: 1389) | | |
| OMNI-173 | CXCR4 | s78_REF | CGAAGGCCCUUCGGUGCUUGGG | GTATATTG | 24.00 |
| | | | (SEQ ID NO: 1390) | | |
| OMNI-173 | CISH | S26_REF | UCUGGGGCCCUGAGCAGUGAAA | GGAAATAC | 20.00 |
| | | | (SEQ ID NO: 1391) | | |
| OMNI-173 | CXCR4 | S46_REF | AGAAAGCUAGGGCCUCGGUGAU | GGAAAT | 7.00 |
| | | | (SEQ ID NO: 1392) | | |
| OMNI-174 | TRAC | S20_REF | AGCGUCAUGAGCAGAUUAAACC | CGGCCA | 9.00 |
| | | | (SEQ ID NO: 1393) | | |
| OMNI-175 | ELANE | g153_REF | UGUCCCUGUGGCCUCUGGGGCU | TGACACCC | 27.00 |
| | | | (SEQ ID NO: 1386) | | |
| OMNI-175 | ELANE | g152_REF | CAGCGGGUGUAGACUCCGAGGG | GGACGTGG | 11.00 |
| | | | (SEQ ID NO: 1394) | | |
| OMNI-175 | TRAC | S20_REF | AGCGUCAUGAGCAGAUUAAACC | CGGCCA | 8.00 |
| | | | (SEQ ID NO: 1395) | | |
| OMNI-176 | SAMD9L | g84_ALT | ACCGUCCAAAACAGAACACCAA | AAAAATCC | 11.00 |
| | | | (SEQ ID NO: 1396) | | |
| OMNI-181 | TRAC | s111_REF | AGCCCCUGGCCCUGGCAGGACC | GATACCTC | 57.00 |
| | | | (SEQ ID NO: 1397) | | |
| OMNI-185 | TRAC | S20_REF | AGCGUCAUGAGCAGAUUAAACC | CGGCCA | 30.00 |
| | | | (SEQ ID NO: 1398) | | |
| OMNI-186 | TRAC | S11_REF | GCCGUGUACCAGCUGAGAGACU | CTAAATCC | 3.00 |
| | | | (SEQ ID NO: 1399) | | |
| OMNI-187 | TRAC | S72_REF | UUCCAGAAGACACCUUCUUCCC | CAGCCCAG | 3.00 |
| | | | (SEQ ID NO: 1400) | | |
| OMNI-188 | CXCR4 | s86_REF | UACCAGUUUGCCACGGCAUCAA | CTGCCCAG | 4.00 |
| | | | (SEQ ID NO: 1401) | | |
| OMNI-197 | PDCD1 | S32_REF | UUGUGGGGCAGGGAAGCUGAGG | CAGTAAGC | 3.00 |
| | | | (SEQ ID NO: 1402) | | |
| OMNI-203 | CXCR4 | S69_REF | AGGAUGACCAAUCCAUUGCCCA | CAATGCCA | 11.00 |
| | | | (SEQ ID NO: 1403) | | |
| OMNI-203 | TRAC | S80_REF | AGGUUACACGGUGAGAGAAGUA | CAACACAA | 6.00 |
| | | | (SEQ ID NO: 1404) | | |
| OMNI-207 | CXCR4 | s79_REF | GGCUUCAAGCAACUUGUAGUGG | GTAAAGAG | 33.00 |
| | | | (SEQ ID NO: 1405) | | |
| OMNI-207 | CXCR4 | s80_REF | AUGGGGUUCAGACAACAGUGGA | AGAAAGCT | 20.00 |
| | | | (SEQ ID NO: 1406) | | |
| OMNI-209 | TRAC | S11_REF | GCCGUGUACCAGCUGAGAGACU | CTAAATCC | 4.00 |
| | | | (SEQ ID NO: 1407) | | |
| OMNI-212 | SAMD9L | g84_ALT | ACCGUCCAAAACAGAACACCAA | AAAAATCC | 20.00 |
| | | | (SEQ ID NO: 1408) | | |
| OMNI-215 | TRAC | S84_REF | UGGCCGGGUUUAAUCUGCUCAU | GACGCTGC | 58.00 |
| | | | (SEQ ID NO: 1409) | | |
| OMNI-215 | SAMD9L | g137_ALT | CUUAAAUUCCAGGCUCUAGAAU | GCTGCTTG | 11.00 |
| | | | (SEQ ID NO: 1410) | | |
| OMNI-215 | SAMD9L | g136_ALT | GUUCUUAAAUUCCAGGCUCUAG | AATGCTGC | 9.00 |
| | | | (SEQ ID NO: 1411) | | |
| OMNI-215 | PDCD1 | S85_REF | CUAGUCUGGGUCCUGGCCGUCA | TCTGCTCC | 5.00 |
| | | | (SEQ ID NO: 1412) | | |
| OMNI-226 | SAMD9L | g103_REF | GACCACUUCAAUGUAAUGAUCA | AAAAGTAT | 9.00 |
| | | | (SEQ ID NO: 1413) | | |
| OMNI-229 | SAMD9L | g84_REF | ACCGUCCAAAACAGAACACCAG | AAAAATCC | 16.00 |
| | | | (SEQ ID NO: 1414) | | |
| OMNI-231 | SAMD9L | g80_ALT | GCAUUCUAGAGCCUGGAAUUUA | AGAACTAC | 76.00 |
| | | | (SEQ ID NO: 1415) | | |
| OMNI-231 | ELANE | g133_REF | AGUCCGGGCUGGGAGCGGGUGG | GGAGCAGA | 52.00 |
| | | | (SEQ ID NO: 1416) | | |
| OMNI-231 | B2M | s11_REF | GGACCAGAGCGGGAGGGUAGGA | GAGACTCA | 40.00 |
| | | | (SEQ ID NO: 1417) | | |
| OMNI-231 | GATA2 | g54_REF | CAGACUCGGAACCGGAAGAUGU | CCAACAAG | 40.00 |
| | | | (SEQ ID NO: 1418) | | |
| OMNI-231 | SARM1 | g50_REF | CUGGAGCAGAUCCUGGUGGCUG | AGAACCGG | 40.00 |
| | | | (SEQ ID NO: 1419) | | |
| OMNI-231 | TRAC | S35_REF | GACCCUGCCGUGUACCAGCUGA | GAGACTCT | 34.00 |
| | | | (SEQ ID NO: 1420) | | |
| OMNI-231 | TRAC | S62_REF | CAAGCUGGUCGAGAAAAGCUUU | GAAACAGG | 24.00 |
| | | | (SEQ ID NO: 1421) | | |
| OMNI-231 | ELANE | g58_ALT | CAGCUGCGGGAAUGGGAUUCCC | AGGACC | 18.00 |
| | | | (SEQ ID NO: 1422) | | |
| OMNI-231 | ELANE | g131_REF | AGUCUACACCCGCUGUGACCAU | AACACCCC | 14.00 |
| | | | (SEQ ID NO: 1423) | | |
| OMNI-231 | ELANE | g114_REF | GGUGUUAUGGUCACAGCGGGUG | TAGACTCC | 9.00 |
| | | | (SEQ ID NO: 1424) | | |
| OMNI-231 | ELANE | g132_ALT | GCUGGGUCCUGGGAAUCCCAUU | CCCGCAGC | 6.00 |
| | | | (SEQ ID NO: 1425) | | |
| OMNI-233 | B2M | S9_REF | ACUACACUGAAUUCACCCCCAC | TGAAAAA | 50.00 |
| | | | (SEQ ID NO: 1426) | | |
| OMNI-233 | CXCR4 | s181_REF | AAUUGCGCGCCGCUGCAGGAAA | CCAAAAAC | 7.00 |
| | | | (SEQ ID NO: 1427) | | |
| OMNI-233 | B2M | S78_REF | UACUGAAGAAUGGAGAGAGAAU | TGAAAAAG | 6.00 |
| | | | (SEQ ID NO: 1428) | | |
| OMNI-234 | B2M | S9_REF | ACUACACUGAAUUCACCCCCAC | TGAAAAA | 61.00 |
| | | | (SEQ ID NO: 1426) | | |
| OMNI-234 | CXCR4 | s181_REF | AAUUGCGCGCCGCUGCAGGAAA | CCAAAAAC | 9.00 |
| | | | (SEQ ID NO: 1427) | | |
| OMNI-234 | B2M | S78_REF | UACUGAAGAAUGGAGAGAGAAU | TGAAAAAG | 6.00 |
| | | | (SEQ ID NO: 1428) | | |
| OMNI-235 | B2M | S9_REF | ACUACACUGAAUUCACCCCCAC | TGAAAAA | 48.00 |
| | | | (SEQ ID NO: 1426) | | |
| OMNI-235 | CXCR4 | s181_REF | AAUUGCGCGCCGCUGCAGGAAA | CCAAAAAC | 12.00 |
| | | | (SEQ ID NO: 1427) | | |
| OMNI-235 | B2M | S78_REF | UACUGAAGAAUGGAGAGAGAAU | TGAAAAAG | 6.00 |
| | | | (SEQ ID NO: 1428) | | |
| OMNI-236 | B2M | S9_REF | ACUACACUGAAUUCACCCCCAC | TGAAAAA | 64.00 |
| | | | (SEQ ID NO: 1426) | | |
| OMNI-236 | CXCR4 | s181_REF | AAUUGCGCGCCGCUGCAGGAAA | CCAAAAAC | 15.00 |
| | | | (SEQ ID NO: 1427) | | |
| OMNI-236 | B2M | S78_REF | UACUGAAGAAUGGAGAGAGAAU | TGAAAAAG | 8.00 |
| | | | (SEQ ID NO: 1428) | | |
| OMNI-238 | GATA2 | g77_REF | CCAGACUCGGAACCGGAAGAUG | TCCAACAA | 38.00 |
| | | | (SEQ ID NO: 1429) | | |
| OMNI-238 | PDCD1 | S6_REF | CAUGAGCGUGGUCAGGGCCCGG | CGCAAT | 38.00 |
| | | | (SEQ ID NO: 1430) | | |
| OMNI-238 | SAMD9L | g140_ALT | CCUACUGAUAUAUGGGCUUCAG | AGTAATGT | 33.00 |
| | | | (SEQ ID NO: 1431) | | |
| OMNI-238 | PDCD1 | S42_REF | CAUCUGCUCCCGGGCCGCACGA | GGTAACGT | 26.00 |
| | | | (SEQ ID NO: 1432) | | |
| OMNI-247 | TRAC | S35_REF | GACCCUGCCGUGUACCAGCUGA | GAGACTCT | 14.00 |
| | | | (SEQ ID NO: 1433) | | |
| OMNI-247 | CXCR4 | s187_REF | AUAAGGCCAACCAUGAUGUGCU | GAAACTGG | 11.00 |
| | | | (SEQ ID NO: 1434) | | |
| OMNI-247 | B2M | S83_REF | AUUCUCUGCUGGAUGACGUGAG | TAAACCTG | 9.00 |
| | | | (SEQ ID NO: 1435) | | |
| OMNI-247 | CXCR4 | s186_REF | UCCUGGUCAUGGGUUACCAGAA | GAAACTGA | 8.00 |
| | | | (SEQ ID NO: 1436) | | |
| OMNI-247 | TRAC | S36_REF | UCAAAAUCGGUGAAUAGGCAGA | CAGACTTG | 7.00 |
| | | | (SEQ ID NO: 1437) | | |
| OMNI-250 | TRAC | S35_REF | GACCCUGCCGUGUACCAGCUGA | GAGACTCT | 24.00 |
| | | | (SEQ ID NO: 1438) | | |
| OMNI-250 | TRAC | S36_REF | UCAAAAUCGGUGAAUAGGCAGA | CAGACTTG | 12.00 |
| | | | (SEQ ID NO: 1437) | | |
| OMNI-256 | CXCR4 | S15_REF | GGAUGGCAAGAGACCCACACAC | CGGAGG | 54.00 |
| | | | (SEQ ID NO: 1439) | | |
| OMNI-262 | CXCR4 | S11_REF | GGUCGGCCACUGACAGGUGCAG | CCTGTA | 26.00 |
| | | | (SEQ ID NO: 1440) | | |

### REFERENCES

[0505] 1. Ahmad and Allen (1992) “Antibody-mediated Specific Binging and Cytotoxicity of Lipsome-entrapped Doxorubicin to Lung Cancer Cells in Vitro”, Cancer Research 52:4817-20.
[0506] 2. Anderson (1992) “Human gene therapy”, Science 256:808-13.
[0507] 3. Basha et al. (2011) “Influence of Cationic Lipid Composition on Gene Silencing Properties of Lipid Nanoparticle Formulations of siRNA in Antigen-Presenting Cells”, Mol. Ther. 19 (12): 2186-200.
[0508] 4. Behr (1994) “Gene transfer with synthetic cationic amphiphiles: Prospects for gene therapy”, Bioconjuage Chem 5:382-89.
[0509] 5. Blaese et al. (1995) “Vectors in cancer therapy: how will they deliver”, Cancer Gene Ther. 2:291-97.
[0510] 6. Blaese et al. (1995) “T lympocyte-directed gene therapy for ADA-SCID: initial trial results after 4 years”, Science 270 (5235): 475-80.
[0511] 7. Briner et al. (2014) “Guide RNA functional modules direct Cas9 activity and orthognality”, Molecular Cell 56:333-39.
[0512] 8. Buchschacher and Panganiban (1992) “Human immunodeficiency virus vectors for inducible expression of foreign genes”, J. Virol. 66:2731-39.
[0513] 9. Burstein et al. (2017) “New CRISPR-Cas systems from uncultivated microbes”, Nature 542:237-41.
[0514] 10. Canver et al., (2015) “BCL11A enhancer dissection by Cas9-mediated in situ saturating mutagenesis”, Nature Vol. 527, Pgs. 192-214.
[0515] 11. Chang and Wilson (1987) “Modification of DNA ends can decrease end-joining relative to homologous recombination in mammalian cells”, Proc. Natl. Acad. Sci. USA 84:4959-4963.
[0516] 12. Charlesworth et al. (2019) “Identification of preexisting adaptive immunity to Cas9 proteins in humans”, Nature Medicine, 25 (2), 249.
[0517] 13. Chung et al. (2006) “Agrobacterium is not alone: gene transfer to plants by viruses and other bacteria”, Trends Plant Sci. 11 (1): 1-4.
[0518] 14. Coelho et al. (2013) “Safety and efficacy of RNAi therapy for transthyretin amyloidosis” N. Engl. J. Med. 369, 819-829.
[0519] 15. Crystal (1995) “Transfer of genes to humans: early lessons and obstacles to success”, Science 270 (5235): 404-10.
[0520] 16. Dillon (1993) “Regulation gene expression in gene therapy” Trends in Biotechnology 11 (5): 167-173.
[0521] 17. Dranoff et al. (1997) “A phase I study of vaccination with autologous, irradiated melanoma cells engineered to secrete human granulocyte macrophage colony stimulating factor”, Hum. Gene Ther. 8 (1): 111-23.
[0522] 18. Dunbar et al. (1995) “Retrovirally marked CD34-enriched peripheral blood and bone marrow cells contribute to long-term engraftment after autologous transplantation”, Blood 85:3048-57.
[0523] 19. Ellem et al. (1997) “A case report: immune responses and clinical course of the first human use of ganulocyte/macrophage-colony-stimulating-factor-tranduced autologous melanoma cells for immunotherapy”, Cancer Immunol Immunother 44:10-20.
[0524] 20. Gao and Huang (1995) “Cationic liposome-mediated gene transfer” Gene Ther. 2 (10): 710-22.
[0525] 21. Haddada et al. (1995) “Gene Therapy Using Adenovirus Vectors”, in: The Molecular Repertoire of Adenoviruses III: Biology and Pathogenesis, ed. Doerfler and Böhm, pp. 297-306.
[0526] 22. Han et al. (1995) “Ligand-directed retro-viral targeting of human breast cancer cells”, Proc. Natl. Acad. Sci. USA 92 (21): 9747-51.
[0527] 23. Humbert et al., (2019) “Therapeutically relevant engraftment of a CRISPR-Cas9-edited HSC-enriched population with HbF reactivation in nonhuman primates”, Sci. Trans. Med., Vol. 11, Pgs. 1-13.
[0528] 24. Inaba et al. (1992) “Generation of large numbers of dendritic cells from mouse bone marrow cultures supplemented with granulocyte/macrophage colony-stimulating factor”, J Exp Med. 176 (6): 1693-702.
[0529] 25. Jinek et al. (2012) “A programmable dual-RNA-guided DNA endonuclease in adaptive bacterial immunity”, Science 337 (6096): 816-21.
[0530] 26. Johan et al. (1992) “GLVR1, a receptor for gibbon ape leukemia virus, is homologous to a phosphate permease of Neurospora crassa and is expressed at high levels in the brain and thymus”, J Virol 66 (3): 1635-40.
[0531] 27. Judge et al. (2006) “Design of noninflammatory synthetic siRNA mediating potent gene silencing in vivo”, Mol Ther. 13 (3): 494-505.
[0532] 28. Kohn et al. (1995) “Engraftment of gene-modified umbilical cord blood cells in neonates with adnosine deaminase deficiency”, Nature Medicine 1:1017-23.
[0533] 29. Kremer and Perricaudet (1995) “Adenovirus and adeno-associated virus mediated gene transfer”, Br. Med. Bull. 51 (1): 31-44.
[0534] 30. Macdiarmid et al. (2009) “Sequential treatment of drug-resistant tumors with targeted minicells containing siRNA or a cytotoxic drug”, Nat Biotehcnol. 27 (7): 643-51.
[0535] 31. Malech et al. (1997) “Prolonged production of NADPH oxidase-corrected granulocyes after gene therapy of chronic granulomatous disease”, PNAS 94 (22): 12133-38.
[0536] 32. Maxwell et al. (2018) “A detailed cell-free transcription-translation-based assay to decipher CRISPR protospacer adjacent motifs”, Methods 14348-57
[0537] 33. Miller et al. (1991) “Construction and properties of retrovirus packaging cells based on gibbon ape leukemia virus”, J Virol. 65 (5): 2220-24.
[0538] 34. Miller (1992) “Human gene therapy comes of age”, Nature 357:455-60.
[0539] 35. Mitani and Caskey (1993) “Delivering therapeutic genes-matching approach and application”, Trends in Biotechnology 11 (5): 162-66.
[0540] 36. Nabel and Felgner (1993) “Direct gene transfer for immunotherapy and immunization”, Trends in Biotechnology 11 (5): 211-15.
[0541] 37. Nehls et al. (1996) “Two genetically separable steps in the differentiation of thymic epithelium” Science 272:886-889.
[0542] 38. Remy et al. (1994) “Gene Transfer with a Series of Lipphilic DNA-Binding Molecules”, Bioconjugate Chem. 5 (6): 647-54.
[0543] 39. Sentmanat et al. (2018) “A Survey of Validation Strategies for CRISPR-Cas9 Editing”, Scientific Reports 8:888, doi: 10.1038/s41598-018-19441-8.
[0544] 40. Sommerfelt et al. (1990) “Localization of the receptor gene for type D simian retroviruses on human chromosome 19”, J. Virol. 64 (12): 6214-20.
[0545] 41. Van Brunt (1988) “Molecular framing: transgenic animals as bioactors” Biotechnology 6:1149-54.
[0546] 42. Vigne et al. (1995) “Third-generation adenovectors for gene therapy”, Restorative Neurology and Neuroscience 8 (1,2): 35-36.
[0547] 43. Wagner et al. (2019) “High prevalence of Streptococcus pyogenes Cas9-reactive T cells within the adult human population” Nature Medicine, 25 (2), 242
[0548] 44. Wilson et al. (1989) “Formation of infectious hybrid virion with gibbon ape leukemia virus and human T-cell leukemia virus retroviral envelope glycoproteins and the gag and pol proteins of Moloney murine leukemia virus”, J. Virol. 63:2374-78.
[0549] 45. Yu et al. (1994) “Progress towards gene therapy for HIV infection”, Gene Ther. 1 (1): 13-26.
[0550] 46. Zetsche et al. (2015) “Cpf1 is a single RNA-guided endonuclease of a class 2 CRIPSR-Cas system” Cell 163 (3): 759-71.
[0551] 47. Zuris et al. (2015) “Cationic lipid-mediated delivery of proteins enables efficient protein based genome editing in vitro and in vivo” Nat Biotechnol. 33 (1): 73-80.

The application's sequence listing, which the Patent Office published only in electronic form, follows.

SEQUENCE LISTING (1440 sequences)

SEQ ID NO: 1 - protein, 1464 aa, Unknown
  OMNI nuclease sequence
MKKYFLGLDVGTENIGYALTKDYEVMQVNGKRTMGVLSFESANTAVDRRTYRATRRRLDRRRYRIALLQELFNDEIMANDKNFLRRLGDNDLYLVDRNVEGKYSLFNDTDFNDIAYYKQYPTIYHLREKLMMEGTDDIRLLYLAIHHIIKYRGHFLLAGEVSTNEVGGVKQLEELINKLNSKLDENNDENKNNDNTCFFDKFATTALSDVKDLICGTGDITKNMLNQITIGKKYISKRDKKNKLNELFGVSSSKTSKKIIDIVMGGKVNLTELFGKEYYEKEEVKGFTMAEEWESIEDLQLIKDNILHIDIIDTIKQIYDWVTLNEMLKGKQSLSSAMVEIYETHKQDLHDLKEFIKDYAPNDYERVFGEIKNEKGKIDNSICNYSCYIGGGRYNGDKIGANGRYGSTCTQEDFYKFIKKIIESVTVEEATALRDDLLERIANKDFMPKIVSKNNSTIPFQLNMMELDGILDKARQNPKFTFLNDVDNGWTIADKIKSLLSFRVPYYVGPVKEYEDNDNNKRYAWAVRKESGRITPWNIDDKIDKKQSNEIFIRRMTNRCTYLKLADTLPKNSILFSKFMCLNEINSMKINGDAISCKEKKAIFDNVFCKKNPTIKNIKKYLIENFGYEKGIVLSGIDNEIKSSMKTYIIYKNKLGNKVDADPNMIERIIFLSTIHEDSQMLEKSIREEFGDKLTEDEIKAIKGFKFNGWGSLSAEFLTGYKNNGIKLMFDGEMLDIIDIMYEYNLNLQQIIFNEKCNFSEALEAYNLEHNIVEDSNVSYNKDIADYPCSPSVKKCVWQSFKLVKDIVKQTKIVPDVVFIESCRENNDFKKNQRTSKRRDMIVAIYDEARKKINELQRDKKAEFSIQELEGLSEDIDYCQKTLDNYSDSELKKENLYLYFMQLGKDMYTGKAIDLNQVLFGNMYDHDHIIPQAVIKDDSFTNLVLVAKKENAEKSRTYPLESQFRQTTLWKKLYKIGLLSNEKYSRLIRQTPITDEEQEKFINRQLVETSQTVVLLRDLLNRYFASKNVEVVLTKAGNVSMFRKEFDLTKSREVNDFHHAWDAYLNIIVGNILNKEFNHNWFIRQDNGKDKSYNFLRVLRKQATANNNEILNIIETTMNNIDFQMVKLPEEKKGNFYSEVLKTHENDKDSSLIPMCDSKIVGGKEIHPKCDTTKYGGYKTANTAYFILADSIDKKGAVQRNIVAISIFDDARIKNGKITYKEIFERIGLKDGKLANVEGMKVPIIKTGSLLDFGAYCLRLAGMTGNRLTFHNANQLFVSKDQNRYIKELGILVDKVVKESKKDTKEDKKEAMALEIIEEIIRRKNNPDNKNSNIIVVNRKDNLKLYDFFVYKLSHNPYKDIPTYSSLLDILQRGKEDFEQKEIYAQVLLLFNIIKAFQCNAQKVDVSALSYVNKKGIATKGGAGQCSIAINSDITEIDKLILINQSMSGLKEQRIQLNLKKVDK

SEQ ID NO: 2 - protein, 1087 aa, Unknown
  OMNI nuclease sequence
MTDIRYRVGIDVGSFSIGMAAIAIDEQDNPSAVLSMVSLIHDSGLDPDQIKSAVTRLASSGIARRTRRLYRRKRHRLQKLDSFITSHGWALKDFEEYPDPYHPWQVRAELSTSKITDQGELGEKLSVALRHIARHRGWRNPYSKVNTLFTQVPHSSGFVAVQEEFSKLLGTSFPEDVTLSEMVVSVPTSSKALRGPKGLLSARLQQSDYANEILKIAQLQDLSEGLTKEIIRHVFAAESPKGSGEGLTGKDPLQPNEYRALKASDAFQKYRIAALIGNLRISDKSGQHRLSKEQVNVVFDHLCNLSFKEEPSWITIANLLNIDRGQLLGTAKITDDGERAGAKPPVHDTNRRIEGSKITPLVNWWKQANEEERAAMINAMSNGKVDDYDSATGANVQAFFSDLPDEEHTKLDALYLPIGRAAYSEDTLQRLTAQMLDNALDLHEARKAEFNIENDWAPPAPAIGEPVGNPAVDRVLKGVARWLKAAESTWGAPVSINIEHVRAAFMSELKTRELDRDNKKRAERNEELVAEMYTNLNIKGRPRAADIWRYQSIQRQNGQCAYCGVPIDFKNCEMDHIVPRAGQGSTNTRDNLVAVCKPCNSEKSNVSFAVWAAKTSREGVSVEQAVERTRHWIADPGLNKKQFDAFVKSICNRLTRKTIDEEIDSRSIESVAWMANELRSRIAQRYKTTGTKVRVYKGALTAEARAASGISGNLRFIDGVGKSRLDRRHHAVDAAVISFISDYVAETLAQRSNLKFSQELRRKAPQWKEYQGSNAAHRAEWNRWLQRMHHLSQLLSQALEQDRVVVMSNLRLRLGNGAAHEDTIGKLTSIKVGDVITTEEIDRASSEALWCALTRHPDFDQKTGLPANPERSIRIHGTHLTADDTITSFPVNAGCIALRGGYVELGSSFHHGRIYKVPQGKKFAFYMMRVYTIDLLPYRKEDLFSVTLKPQTMSVRQCHPKLRQALENNTAEYLGWLVTDDELLIDTAKFNTGQVAGAQQEFGQIKRWRLDGFVSDSKLRLRPLHMSKEGLKPDASSDSKKIIDNPGWRPAVNKLFTDSHVTVIRRDALGRPRLQSTAHLPITWQVK

SEQ ID NO: 3 - protein, 1560 aa, Unknown
  OMNI nuclease sequence
MDEVKRYYMGIDLGTDSCGWCVTDQNFRIIKKSGKHLWGIRLFDDAKTAKERRSFRTQRKRLQRRRYRIACLREIMGPAIEAVDKDFFQRLDNSNLFDWKDESKKIPLKKDSLFNDPQFHDKEFFRAFPTAYHLRSYLLTTSKRVDIRWIYLALAHIIKYRGNFLNPNEDSNGNMDLHDIKNSFQSINAIAQTIYDQCDDPDLKEKGSSFIGFGFKSTGSSFDPDSLNSFEITDEEAIKVKEIFKNCTGVTETFEKLANLFDEAVKNKFLSTILKLICGGKVNSKDLFLTDDYVDDQNFKSIKLDDWDEKLEPNLSSINDIFASLLQECKALYDAHNLTNLLGDYHFISQAMAGRWDEQKDEFEGGRYNEHRSQLRDLKHIVKTYYPDKYSVIFRDLLDKGQKDDGKENYPSLIGSSMVNRRKIKSKHAKIDDFYSFLKKTINLDDLYKRLKDSSLPAEKDDLKIVEKINEDIKNRKFLLRQNSGENGYITHQLHRAELLKIIDKFKADYPCLGEKDDRGNYKILDILMFKIPYYIGPLDNNSKNVNSWARRVPVNHPQGKIKPWNWDEFVDKPKAAEEFVERMVNKCSYLLSEKTLPANSLIYTKYKVLNEINKIAVSIDGSVSRFFSQDEKDSLFKLYEEKGKPTLSDIKNWAKLYFSSDKVELSTSQSSDRVNKLDKNYLQSNLNSYRDFKNILGDINHTNFNIIESIIRDITIFEDKSILDERLRNINISGHKLNDEQISKIKNLNYKGWGALSAELLDGIKGMDHAPQSEEEIESADGPTILEAMEKVSEDENGNYHSDNFMEVLNNSKYHFSDIINFINEEKGAETYKGFVKYIEDSFGSPMMKRATIQAMKVIREAEHIIGHPIDRFFIESTKSPDKNQKGKNGNDKLRSRELSKRYEQIMKSISASDQDKINKDANEKLKGLIGKNDNSKFRIKRVYLYFLQMGKDVYTGEDLSFDDVLKGTDKYDIDHIIPRSMIKDDSLDNTVLTSKAVNNQMKGDRYPIPRGVITSKGREAIEFLHRNGLISSVKYKRLLRTKDFTAEELAGFINRQLTSTSQSVKALGQVLKIDTDIRREKAKKSGQGFEEYRNPNWKQVIVYPRASNTHDFRVLFDFPKCREVNDFHHAHDAYLNIVVGEVYRSKYGDIATAKKIKELRERKINEDGSETGPTNVFGKIWDENIKRTGSGDTSRFDWIPDTKDKSKKDATIRIIKKEISRKDILFTRMPIEKNGGLWDINIISPKGKDNLVSHMSIKNSPKDSRLYKLHDVEKYGYYNNPSALYFSVIRAKVDKNKDFSYYLVPVPSYILSKNALDDNLVSYYKVNGFDQPEIIIKKVLLNTICSYDDDKSQPVYRFMIASKTGKSIKVYNAWQAYYPDKFMCYGKLISSFVDKYIKNKDLVSDKEEEYKVFKGNSKDWYDIPIPDKISKENNLELYDFLAKQFSKNIYKHWSIFSKLGESLPRIRDGFISSSLVDQTLFLECLINSLHPGEFNFKSAPEGLLKLNNCKKQSGLLRINQSLGPGFKLYAQSPTGFYENVIFAIDKNGNEVSTKKNGV

SEQ ID NO: 4 - protein, 1205 aa, Unknown
  OMNI nuclease sequence
MKYNYILGLDIGISSVGWGLLALDENNKPYKIIDVGSRIFTPGEVEKTGDSRAKERREKRGSRRVTRRREFRLDRIRNLLYESKLLSGNVSSSIVSEKNNELTILYNNMINNYYKSNNTNPYRLKVEALDRKLTAEELAIILVHYAKKRGYKSNREESNDNDSGKVLSAIKENETIMATNNYRTVSEMYIKDEKFKDKIKNSPGNYKISVTNEMYLDEINKVLDKQIKFGLIDSEFKNQYLEIYNSRRSYAKGPGGTSPYGGDLIKKMTGKCIFDKEPRAPKYAFSSELFVAISKLVNLRYKIGNESYQSLENAAIVKLIDLAKEKNIVTYKDLVKVLNKENVKIKDLNMSMKDSKVIEELRKKLAISNEQEINIYELSEDDKKIYDSIYNEKLFSKTLIELKGYHMLRKVITLCYSKDIWNEVKNNIEFLDELALYCTNYKVNEDIKKEIKSSKVIDSRFEEDDFIKALPNFKDHLMLSTNIIRKLIPIMENGITYDKAMKEIGYNHSDLSGKFEKKDLLVPVYTIQNITNQRVIRSLTQARKIINALIKKYGSPKIINIETARELAKSRKERNEIEKNQQERKAKNEQIKKQLVDLELFSDINKISSNDLLKYKLWQEQKEFCGYSMRKIKIEDLFRNNIVQIDHILPYSRTYNDNYLNKTLVYTNENQDKGNRTPYEWFGKTRKWENYESFINSLSTAQAKKDNYLLKKLDFDTEREMREQNLNDTKYISKELANLIKAHLKVEKVNTYPGAITGKLRARWGFNRLTHSYISQTYIMPESMKSDIKKDRENHLHHAMDALVIASITPSLQQKITLYEKFSRYIDGVVKSELRKINMENIEESLGEFYDSETGEVKEVEFKEYVSEQLSHGHISFLKHDVSKLEFPLPYEKFVKEAKTRVYEQNIDILKRDLQLLGTYTTEELAKVHTLTPSVAKSKISGKMHEETYYGIKEIKEEEATVKYKTLRTPIEKVKRKDLELIPDCRAGSKDIYNTLVDWFGTAENGTEALKQHEGKYPINPNDKEQKEIKRIRVYSEYKGIGHVIKNSNVEKGGIYRVDIYTSRNENDEKLYFAAHDIYEIKKIKAYKDKKHEDKKFKIKLDYGQGEKYKIIEYDELMKEYNLKMSIYKNDLIRIILKDGRESIAYMVGCSSGMIEVKSKLGDGYDIIGNNNIFSKKRERYTVTLSTISKIEKISINLLGEISGL

SEQ ID NO: 5 - protein, 1059 aa, Unknown
  OMNI nuclease sequence
MNKILGLDLGIASLGYCVINIDDENFAAGDILATGVRIFDVAENPKDGNSLAAPRRKARSLRRILRRKVMRIQAIKQLFLDFHLLTPQELNFLSQQDFKRLYRADQLVNGYIPSVWEIRARGLDERLPMQDICRALLHIAKRRGFRSMRKSDKPSGEAGKLLKGVEEMSKTLQASHFRTIGEMLYHLPTTEPKRNKDGSYNHSIARALLEKEVHLLLQTQRDKGAALLSKEFENKFCELSFSQHPLQPSDAGYCTLEPNKKRAPKHAYTAELFAALCKINHIYLEENSHSYPLSASQRALALEKCLSTQKTNYKQLRELFNLPDHIKFNISYTAPAKKKSKQTETKSPEQIAQEAKEYDAEKNTTLYNMTGFHALKKALNSMPLWTEYKNNPNGILDKIAEILSRYKSDGEINQHLTALGLEAEAVEKLQNVNFSGFMNLSLAAMNKIIPFLKEGLLYHDACQKAGYNFQATPQNKGLSKLPPLTEEDGHTITSPVAKRSLAQARKVINALNKKYGPFDAVHIEVAREIGKSFEKRKEIEANQKANAEERTRLKEVGIDGIIPKTETDLKKLRLWKEQEGFSMYSHTYIDPKKILEEGFCEVDHIIPYSKSFDNSLNNQVLCLASENQEKKNCIPYEYFQNRKTQITWEEFEGYVNCLKNMRMAKKHRLLKQELTKEDLQGFKERNLNDTKLISRFMKNYLSANLKLTGKYKQGVFCINGQHTNTLRGFWRLTKIREEGDKHHALDAIVIACCTNQLMNYISTKYCQGREMELKRKEVAVPWPWPHFKRTVENALLGIFVSRPPRKKVTGPLHKDTFYSAKHIAKGIKTLRTDIQKLTIEAIKKQRELEVKYFGVERNKPLYDLIEKALRARPNDKTPIEVQLPTKNGGGVPVRHIKLITESTTGVPVLGGTARAENGPMPRVDVFLENGKYYLVPIYTMDFAKRQLPLVAQPSGRLMKKENFVFSLYKDDYVNVVNEQGETWEGYFKQLNAQTGQIYLESHDRSAKYTVSGKPSNQKKIASSTLKLIEKYQIDIFGGKHLVKKEKYIGIIRKNKGFGG

SEQ ID NO: 6 - protein, 1181 aa, Unknown
  OMNI nuclease sequence
MKYCLGLDLGVGSIGSAVVELDAQNNPESIADAGVRIFEVSEGAIDRRTKRTARKNLIRTKKRLELLAQKLFENNLWVSANPEGTDNLKSKSPYKIRYDALNGKLENQNYIGRAILHLAKHRGAGFVSASEESEEEVLEEGEKSRKKPTAYELMVNHLKETNSRTIGEFFYKRILESYEKNKETGEHDKIKLRTVRQKSGAVDYAIPRYLVKDEFKQIWDKQAEYFPQMQKDGLKQEIYDILFYERPAAPYATGKCIYFRDEDRLLKAHPLSEMRRIYEEVNNVSVLSDTGKRHLTIEERDKIVNELLLQGKNAGCQSIKKVLNLSGQQKLSIDEKEEKQKPIKAYLYSRPEFAQVDYIKNLSQDELIKFTEFLGNPLNPEDRHGRLYNEDEVINKLKPILGIDDEKQIAKLLTMLPKGRVMLGISATQKILDKLKTETDENGYVLGHRKITDKLAKEDKRFMAAEEIARQNQGKCFELPYYGEILQTDTQSFPPLLLKNNHSLNEDEKQWGKVANPAVHMILNQIKLVVNEIVKIYGRPYEIHIELGRDVGLSTKKKNSLEKMQKANEKLNEEAKKYLLEHKIYVNSKNILKWKLAQEQGWVDAYNPTQKTTQKIDRRFIGFEIEHIIPQSRGGTDTYNNLCLVSRADNEAKGNEFAYDYFVKSKTPEMIRAILNNARTKLKNKAWRFEADAREKFEDEGDKEETNRYMTDTRYVSKLAARYLRAIVDCSADDGVIENRILAVKGGQTAELRKRWNLQGLEYDLMGLNIPRYIDCAPYWQNLETGEIIDGEQKPDIDGNWKFYDCKKNPEWSAKPRIDHRHHAMDAITVACCNWNMIRQMANETDLHKVTVPLPMASVQSVGEFRRKVIDVLKEVKVSHKPDHNKLGQFHEETGKVKLGINPDNPDNLITVYSRKILQVVKTYKDLDKMLIPDSVKDSWHEEIAENRVRQAKLVADFKQYWNLAEQILLAENEKDMAEGKKEREITEGLIIAKTFHILLDKKFMGEKVWKGDKFKCYENVSSYVYVRKHNLVYKSGNNHCVDFYEKDGKVGWEVVKRFDVNQDGFVPQWKKDGGKLIWSVQQRDMLELDTPDEWKSYTDKERCLAKVKKFSDGKLTIDYMADARMTAPKDKTLKYMFVDSVSEKGLSFFIKHKARKIELTPFGKVKKKHKVLWNGKKTAA

SEQ ID NO: 7 - protein, 1093 aa, Unknown
  OMNI nuclease sequence
MKYKIGLDLGSTSLGWAVVELNEADQITSLVDMGVRIFPDGRDAKSHKPINVIRREHRQMRRRGDRVLLRKKRVLQLIHKYGLDFDISADIKLEDPYVLRARAVSDKLSSAELGRVLFHLALRRGFKSNRKETRGDSGGKLKKATLALHDAIGDKTLGEFQVDSKRYRFADQFDGNKIKDGALYPTRDMYLDEFNRICSVQNMSDDMRQQFEYAIFHQRPLVPPEIGTCMFELDQPRAYKFEPVFQRFRVLQQINQLRIINNGEIKELTAEQREKLQDALLATFCGVKRDKSGRPKITFAEVKKLLGLSRNTKFNLESEKRKDMDVDATAFAFAECELADFWRACTDNVKSQVLAHLNDDELSDSDLVDYLAHEYGISQDKAEKLIQQPFEDGVANLSVCAMQKMLPFLEQGHLYHIAAKEAGYDHADRGIVHLDTLPYYGDVMALRPSLVQDKMGRYRTMNATVHIALNQLRAVVNDLIARFDGEPYAINIEMGRDVSAGADERAEIEKQQAANKRENDRIATELVAMGVRVCRENIQKYKLWENLGKSPLDRRCVYTGEIISKEKLFSPEFEIEHILPFSRTLDDSMANKTISAAVANRFKGNRSPDEAFSDPKSPWKYEDVVARAQNLPDATKWRFNRGAMDVFLQGKECIARAMNDTRFMTRMAVTYLQHVCADKNRVNGMPGRLTASLRDEWHLNWWKNKAEESKYRGNHIHHAIDAFVIACTDENILRKLADAKSDMHTPFPGFDYFDFKMRCENTIISYRQSQKNPKDAHSTVGCLHEDTAYNLECFEDGGCGVNAVMSHREELPTTDKDKKAFAKDFKNVNPKTLQMFLNDAGVANEEPDIAIKFLDWCAMRNIRKVRMYKTGVDVTTYVPVFRTKKQRDVYRAAYLNWYVNTGVASGIVDKKLRAVQQEKEKHLLQEFQDAAKQAYKWYVGGNNFCAEIFEIRDDDTRYPKLRGRWQVEILSNYNAQLNAGAPLWRHKYATAKRIMSLRINDMVMAEFSKDDPKLPKGLVETVAHQCAIEKTDKVNVVFRVKKLNSSGTVYLRPHFIAKEDADTKSWIASATSLQEHKARKVCVSPSGKILGLK

SEQ ID NO: 8 - protein, 1093 aa, Unknown
  OMNI nuclease sequence
MKYKIGLDLGSTSLGWAVVELNEADQITSLVDMGVRIFPDGRDAKSHKPINVIRREHRQMRRRGDRVLLRKKRVLQLIHKYGLDFDISADIKLEDPYVLRARAVSDKLSSAELGRVLFHLALRRGFKSNRKETRGDSGGKLKKATLALHDAIGDKTLGEFQVDSKRYRFADQFDGNKIKDGALYPTRDMYLDEFNRICSVQNMSDDMRQQFEYAIFHQRPLVPPEIGTCMFELDQPRAYKFEPVFQRFRVLQQINQLRIINNGEIKELTAEQREKLQDALLATFCGVKRDKSGRPKITFAEVKKLLGLSRNTKFNLESEKRKDMDVDATAFAFAECELADFWRACTDNVKSQVLAHLNDDELSDSDLVDYLAHEYGISQDKAEKLIQQPFEDGVANLSVCAMQKMLPFLEQGHLYHIAAKEAGYDHADRGIVHLDTLPYYGDVMALRPSLVQDKMGRYRTMNATVHIALNQLRAVVNDLIARFDGEPYAINIEMGRDVSAGADERAEIEKQQAANKRENDRIATELIAMGVRVCRENIQKYKLWENLGKSPLDRRCVYTGEIISKEKLFSPEFEIEHILPFSRTLDDSMANKTISAAVANRFKGNRSPDEAFSDPKSPWKYEDVVARAQNLPEATKWRFNRGAMDAFLQGKECIARAMNDTRFMTRMAVTYLQHVCADKNRVTGMPGRLTASLRDEWHLNWWKNKAEESKYRGNHIHHAIDAFVIACTDENILRKLADAKSDMHTPFPGFDYFDFKMRCENTIISYRQSQKNPKDIHSTVGCLHEDTAYNLECFEDGGCGVNAVMSHREELPTTDKDKKAFAKDFKNVNPKTLQMFLNDAGVANEEPDIAIKFLDWCAMRNIRKVRMYKTGVDVTTYVPVFRTKKQRDVYRAAYLNWYVNTGVASGIVDKKLRAVQQEKEKHLLQEFQDAAKQAYKWYVGGNNFCAEIFEIRDDDTRYPKLRGRWQVEILSNYNAQLNAGAPLWRHKYATAKRIMSLRINDMVMAEFSKDDPKLPKGLVETVAHQCAIEKTDKVNVVFRVKKLNSSGTVYLRPHFIAKEDADTKSWIASATSLQEHKARKVCVSPSGKILGLK

SEQ ID NO: 9 - protein, 1109 aa, Unknown
  OMNI nuclease sequence
MKYKLGLDLGSTSLGWAVVELNDMDNITRLVDMGVRIFPDGRDAQSHTPINVVRREHRQMRRRGDRVALRKKRTLQLIHKYGMDFDIHSNVSLENPYALRARAVVEKLQPQELGRVLFHLALRRGFKSNRKETRGEAGGKLKNATVSLQVAMGDKTLGQFQFESHRYRFADQFDGNKIKDGAFYPTRDMYLDEFNRICAVQELPDNVRKEFEHAIFHQRPLLPPVIGTCMFELGQLRAYKFEPVFQRFRVLQQINQLRIIDNGVVTELSGEQRQKLQDILLRTFDGVKRDKSGRVKITFAAVRKMLGLARGVRFNLETEKRKEMDVDTTAFAFSECGLSDFWYACPDDKKSQILARINDDTLNDDDLIDYLVDKCGLNSDVAAQLIQRPFEEGIANLSVCAMQKMLPFLAQGDLYHVAADKAGYNHADRGVVQMAQLPYYGDVAALKPSLVPDKNGVYRTMNATVHIALNQLRAVVNDLIAQFGSVPYAINIEMGRDVRAGARERAEIDSQQAANKRENDRIASELVVMGVRVNRENIQKYKLWENLGKNPLDRRCVYTGEIISKEKLFSPEFEIEHILPFSRTLDDSMANKTISAVAANRFKGNRSPDEAFTDSKSPWHYDDVVARAQNLPGATKWRFNRGAMSAFLHDQDCIARALNDTRFMTRMAVTYLQHVCADKYRVTGMPGRMTAMLRDAWHLDWWKDKADEEKYRGNHIHHAIDAFVVACTGVGTLQHLSRNAIETDKLFGKTQKEKRRQWFVDMNVPFDGFDYYDFKMRCENTIISYRQSQKSPKDSKGTIGCLHEDTAYNLEFFERGTTAVMSRRDALPTTDKDKKDFAKAFNNVNPKTLQMFLKDTGTTNDEPNIANKFLDWCTLRDIRKVRMYKRGVDVTTYVPVFRTKRQRDTYRAAYLNWYVASGIAGGIADKKMRLAQQEKEKALLQEFQNAAKLAYKWYVGGNNFCADVFKMRDDDKRYPKLRGRWQVEILSNYNAQLDAGSPLWRRKYATAERVMRLRINDMVMATFSKDDPKLPKGLVKTVMHQCTIENTDTVNVIFRVKKISSNGTIYLRPHFIAKEEGDTKSWAASAASLQEHNAHKVYVSPSGKLQCSE

SEQ ID NO: 10 - protein, 1062 aa, Unknown
  OMNI nuclease sequence
MDYILGLDLGSTSLGWSVVELDKNGVPVRLERMGVRIFSDGRDSKTKEPLAVARRTARGMRKRRDRYVMRRETLMNKLIKYGLMPENASERKALERLNPYELRVKGLDEKLSPHELGRVLFHINQRRGFKSNRKTDRKNDEAGAMKSAIRDLTEKMTESGARTLGEYLYNLNKDRKSTQNFAPVRVRTHLEKSKAVYSMYPTREMYEDEVRQIFLKQTLSDEIKADLFKTVFDQRPLKTPPKGLCPFEKSEERCYIAFPDFQRFRALQQINQLRVRDDFTEVELDDKQKRELRHWLLDDFSKLDKDYRLTFAAIKKILKLPKNVKFNLESERRKGLDADKTSAQLQPLFGTVWAEKQDEIVDLLLNMENEDELKQALQKYGLTDEQIEQVLTVNLPDGTGSLSLKAIGKINPFLEQGMLYDKAVVAAGYVFSKKFDKLPDKYETFIDPEYGTVFDELPYYGQALPERVIGGTHKDEDKGDEAKFFGKINNPTVHIALNQVRKLVNVLVKKYGHPNSIVVELARDLKLSRDEKKRLEKEQTQNEAENKRIGDELVRLGVKNNYDNRMKYKLWEDSSKDPIQRCCPFCGKPIPAAELAMSAEFEIEHLLPFSRSYLDARSNKVLSCRRCNREKDNRSPWEAFHNDAKRWNEILARAEKLPENKRWKFNEDAFKKLQDENGDVLARMLTDTQYMSRIARQYLCFAANPKRVYGIPGQLTSKLREHWGLNSILSEQHEKDRTDHRHHAIDAFVVACTSRGTLQKYATERRDFGEMPQEKAPHIPFPAFRLAEIKDAFDKIVISHKPDHGNPQKAIRQGKTVAKLHEETYYGMIGDGEKKGTVRLTKRVPCLAFTKSFNPQKKPYKVEDIVDQSGTANKIRERLENSDPADYEKIVMEYFNERGMKHVKVFEDRNKNVVLAFNDRKTKQPYRYAIYGGNAYAEIYCPDRGKNAGKWQIEIIPNYRAHQKNFVPNWRHMDAHAKLIMRLHIDDMVAYEENGKTVIARVKKMTSGKIYFRENKIAKEDGDSKSWAAYPSGMQEKNMRKITVTVDGVVLDSKRPKGGADG

SEQ ID NO: 11 - protein, 1017 aa, Unknown
  OMNI nuclease sequence
MRIFGFDLGVASIGWAVVDIDKENDNPEAGRAAIGKIQQSGVRIFSKAESTDGSSLAAPRREKRLVRRALRRKALRMKEIRALLENSGLGSQNIVVNADDIDVWALRAQDAFCRKLSARELSRVLIHMAKHRGYKSMRKSAEENDKETGKVLVSIARNRESMGEYKTMAQMIYKSNCDGARKYRNGDGVYDNSIPREEIERELNYIFDAQQKYGVFTEDLLEQYKKIAFRVRPIQSVGKMVGLCTLEPNCLRAPKESPTAELFVALTKINNMKIVIDGEVRSVDDAERAAILELLSKTQTVKYKTLHNKIWKGKDVVFRGVKEESQDFYSMTGWHKLKKIMDEADMADTRMLDRIMKVVATQKDDSAIEKELRRKKVPEKYIVELKKLCTSKFINLSLQALYKIVPEMMRGLTYDKACDGAGYDFKSKVSGEVKADNGCIAEISEWTHVPVVNRTVAQFRKVYNALVRKYGIPDQVNLEVGRELKNNFDDRKKIERKQNENRDKTEKARAEYEALISRKVTTKEVLKYKLYQDQGGKCMYSGESIDLEHLDNYEVDHILPYSRSLDNSYMNKILVKYTENQIKGNKTPYEYFGNTLRWDDFVVRVSATKTLGARKIYNLLNKDFETTEDDFRKRNANDNAYAARYVRQVLNTAFPDLRVDVRAGALTHYLRGQWGLEKSRTESDRHHAQDAIVIACATPGMVRYLSTISGLFENKRNEKGKPWWNNLKQNIQEPWAGFRADVFRSVDDVFVSRTVRGKATGSVHKDTINSPKSSKGSLILPRGRADKENMFRMDVFKKDGKYVVVPIFVADTVDKKRQDIFYPQPAKAEHSVAIDGTYEFVMTLHKEDYIKIVTVDDKVYEGYIIQCDMPRGKFVFRNSDNSAVFSVKTDTFEPGDFIVIDGNLCKVMDYLAGKLRALSPNGIVEEVEAVKKQTRKGKQIQTIDKYEKRSKQKTINIGTVKNLQKFQIGVLGDMSEVKSGHRAPVCAIKLQSEKRKGRKQPKRNKNGLANPSTNETM

SEQ ID NO: 12 - protein, 1471 aa, Unknown
  OMNI nuclease sequence
MKKILGLDLGTNSIGWAVVNEAEHVDEQSSIVKIGVRVNPLTADELSKFEEGKSITTNAYRTLKRGMRRNLQRYKLRREHLLALLKEKGFISEETILSESGNRTTFETYRLRAKAATEEISLEEFARVLLMINKKRGYKSNRKAKNTEEGQLINGMEIAKRLYQENLTPGQLCWQLLQDGKKSLPDFYGSDLQSEFDKVFEFQRQYYSFLTDELKKELSGKNDKAVWAICAPSKEKESSDEKFVWKWVETVTEWDEETSANQTVEKVKTLEGLKREGNTAERKRENYEWRSRALEEQLSPEQLIVVFQEINKQINNASGYLGNISDRSKELYFTKQTVGQWKMKKLDEDPNHSLKNKVFYRQDYLDEFEKIWETQAKYHSELTPELKKEVRDIVIFYQRPLKSQKGLISICELEGKQMEFEKEGKNKLVTIGPKVCPKSSPLFQEFKIWQRLNDVQVVNAEGERRFLNQNEKNVLFEELNYREKLSKTETLKLLFDKKHKEYDLNFEGLDGNRTQSELFKTYQKIIEMTGHGEYDFSKMSAKAKVELVTEIFEGLGFNTEILTFDSSIKDKKEFEQQPFYQLWHLLYSFEGDKSVLGNEKLIEKISEMYGFDKESATVLAGVIFQPDYGSISAKAIRKILPDMMRGDNYSTACEKAGYNHSKRSLTKEELEKKVWKDKLDLLPRNSLRNPVVEKILNQMINVVNAVVDAYGKPDEIRIELARELKKSAKERDELTKAINNTKKQHDVYTKKLQEEFGLTHVSRNDIIRYKLYEELRSNGYRTLYSNTYIPREELFSKKFDIEHIIPQAKLFDDSFSNKTIEARDVNIKKSNMTAWDYVVLTNNEGYANNEYKNRVEKLFADKIISKSKRDKLLMREVDIPSDFINRDLRDSQYIAKKAREILEGMVKFVVPTTGSITDRLREDWQLVDVMRELNWDKYDRLGMTYYEQDRDGRQIPKIKDWTKRNDHRHHAMDALTIAFTKRSFIQYLNNLNARVQKGVDEWIDLDTVELSKLDKEQRTSVVYAIEKKELYRDSHGKLRFNPPNLTNNRDIEQQLSQFRREARRQLENVLVSIKAKNKVVTRNVNKAKNKSGEYKMQLTPRGKLHLETVFGSQNRYVTKEEKVNASFDAEKIKTVAVKRYREALVARLAQYGGDAKKAFTGKNTLDKNPVWVNAQQSEKVPEKVKTVEFEKIYTIREEVTPDLKIDKVVDAHIKKILQNRLAEYGGDAKKAFSNLEENPIWLNKERGISIKRVTIERMGNYIALHDKRDKNGNLTLDENGKKLPVDFVSTGNNHHVAIYRKPVLDKNGLPVLNENNEVEYELDEKIVSFYEAASRAMLGLPVVDKEYRKSEGWQFLFTMKQNEYFVFPRYESYIDSEGKEAQRMIFNPTEYDEAWYKNPENYALISPNLFRVQKFSYKNYVFRHHLETTIDLSEYNLRGTTWVDFRSSKWLDKILKVRVNHIGQIVSVGEY

SEQ ID NO: 13 - protein, 1517 aa, Unknown
  OMNI nuclease sequence
MLMKKILGLDLGTNSIGWAVIGAESEKRDDGSEYLKPESIEMAGSRIIPMDASILGNFDAGNSVSQTADRTGYRGTRRLRERFLLRRERLNRVLDLMSFLPEHYSSQLDRYGKFISPDIEPKLAWKPSIDGKNEFIFMDSFLEMLADFRQYQPELVKEGRKIPLDWTIYYLRKKALTRPISNQELAWILLNFNQKRGYYQLRGEEEEENPKQKVEYYSLTVVGVEDSGDKKGSDIWYNVHLENGWIYRRSSKYPLDWVDKKKDFIVTTALDDNGNPKTDKDGNVKRSFRAPKDDDWTLMKKKTEMDIDQSGHTVGEFIYDSLLANPDQKIKGKLVRTIERKYYRQELSQILKKQQEFNKKLQDKELYTRCLEELYPKNELHRRCVSVRDFAYLFIDDIIFYQRPLKSKKSLIDDCPYEKYHYLDKGVDVFRPIKCVSKSHPLYQEFRLWQFIDNLRILERTKLIDGRLQSDVDVTAQFLKDNDDYAALFDFLNNRSSVNQDVLLTKYFNIKKPRQKDAVIPYRWNYVEEKEYPCNETRSAMLAGFKKAGIPQEVLTTEITEALWHILYSISDKQELGKALDRFAEKNRLDKSFVDVFSKIKPYDSSYGAYSAKAISKLLPLMRRGKYWNLNAINPGTRQRMEKIINGEFDESISSRVWEKSASLKTETDYQGLPLWLACYVVYNRHSETGEIVKWNTPNDIDVYLNSFKQHSLRNPIVEQVVLETLRTVRDIWKKTGSIDEIHVELGREMKNPADKRARMSQQNIANENTNLRIKSLLAEFANPQFNIENVRPYSPTQQDILRIYEDYALSSLKADDQDYEFIHKMSMTAQPSHNDVVRYKLWLEQKYISPYTGQVIPLAKLFTSAYEIEHIIPQSRYFDDSFTNKVICESEINKLKDKQLGYEFIKNHAGQKVQISQTGQFVEVFSIPAFEEFVKQHYSGPKLKKLLMDDIPDQFIERQMNDSRYISKLIKGLLSNIVREKTESGDYEPEAISKNLIPSNGQITDRLKKDWGVNDVWNSIILPRFVRMNEITGTTGFTAINQKGHVIPAMPLELQKGFNKKRIDHRHHAMDAIVIACTTRDHINLLNNEAALSKNQSNRYALSRKLRRYESVQIEKHGEKKTIEVAREFLLPWPTFATNTRSALDNIVVSFKQNLRVINKATNRYLHFNEIGVKVNEKQTIGNNMAVRKPLHKDTVFGMVNLKLKKQASLNDALKAPSMIVDPAIKERVHNMKDAGFDTKQIKNELEKDGSISGKIEVYYFSNGTNERYFATRKPVDSSFDEKTILGSVTDTGAQQILLAHLSRCNNDPEIAFSPDGIEQMNRDIRQLNGGHDHKPIFKVRKYEKADKFAVGQTGNKRSKYVEAAKGTNLFFAIYRTETIDKETGRTVFGRAFETVPLNVVIERLKQHLAPVPEQNENGDRLLFWLSPNDLVYVPTPDEIETGHISEPIDKRSIYKMVSSSGPQCFFIQESIATPLVNKVEFSPLNKMERSICGAMIKECCIPMTIDRLGEISFKQ

SEQ ID NO: 14 - protein, 1472 aa, Unknown
  OMNI nuclease sequence
MDNILGIDLGTNSIGLSLRNTNFNGSIQNQLEYFTSIIFPSGVGKGKSGEFSYAAERTKHRSSRRLYQARRYKKWKTLGLLIENDYCPLSMEDLEKWSKYDKAKGLKRQYPIHATNFEQWIRLDFDGDGKPDYANPYELRAELMEKQFDFTKQTNRYKLGRALYHIAQHRGFKSSKGETIKEQEQNEKDNIQDFDLAEALKKSEEKKSGKLSEYMKKYNLPTVGCAYAHLRKNGIRVRNSIYQAVRSQYKDEIKQIFEYQNGLDKNSDFYKRLLSEKKGEGTIFYKRPLRSQKGQIGYCTLEPNKPRCPISHPEFEKFRAWCLINNIRFGEDLKETLTLEQKRELFHERFLLTRSSFKFEEIRKWIERETFMRLDYKAKTINYKDKTNVSGCPISGRLKNLLGEDWEKWMCKTGITKVIKQKKDGKYTERQVEIGYSSYDLWHICFSFDEPENVETFAKEKLHFDDKQAKQLVRIFFAIQQGYSMLSLKAIKNINRFLEEGLIYSDAVLLAKLPDIFKDRWAIEKDAIVSQIDLVIENNRKQKLLFNIVNTLIANYKSLGYDDEIQFNERFADHNTTYKLQPSDYNDIKTVTIKAIGEKTWAKKDEEKQKAILEQVAVLYQNFFASEQRDYYKLPKVADDLAKLLHEKYNFLQEKDLKKIYHPSMIEFYASAKEQHLDDGRWMKLLGSPVIGAFKNPMAMRVLHVLKKQINELLKASLINGEETRIVVETARELNDANMRWAIETYQREREAENKEYEKILNEYFPNRNINDKEIEQARLMCEQHDIPESDILQQKEKIDKDKTLKSLIYKKDLTKYRLWLEQGCRCIYTGKMINITNLFDENAYDFEHTIPRSLSFDDSLANLTICDAHYNRTIKQNQMPTQLANYDKDANGYTAILPRLQPWIDKVERLKDNVEFWKTQSKRAQDKDRKNQCIRQQHLWKMELDYWKAKVDRFTMTEVTSGFRNNQLNDTRLITKYAYHYLKTVFNKVDVQKGKITSNFRKILGVQSTDEKKNRDKHSHHAIDATILTMIPSAAQRDKMLEIFYKIQEEEKLHRDTTVLKKELNKEIKKCNLPTNVSLIAPFIENNILINHVSKDQTLTPAHKRKRIRGKIVPLRDADGTIIYETNADGTVKKNKYGHPIPKAKQWITGDSIRGQLHKDSFFGAIKYPIIDKEGKPTRKNGSFIYEKESNGQDVISMVMRVPITSFTKEDELKKIVDPTIRASIAKTIAKRKEEGKSFKAAIEEPIWLLDKDGNEIKIDKNGLPISPIRHVRCKVAAGRGFFTKDKAIEVKEQTYPSKYPYKNIYYAQNDGNYLCLLYEGVKKGKVVRQFKFINYFETISLGIKNTNSLYSEPYFQKIEDRKTELKLSAVIKTGTHILMWKDSPDELESLTNEQLSRRLFVVYKFNLKGANCIYLENHLEARNEIPQKEDYTIFDTTKYQARLTLVANGFNCLIENRDFKINAIGNIEWL

SEQ ID NO: 15 - protein, 1501 aa, Unknown
  OMNI nuclease sequence
MKRILGLDLGTNSIGWAVVKSENVEGKDVLTGIEGAGSRIIPMDAAQLGDFDKGNTQSQTKDRTHFRGVRRIRERSLLRRERLHRVLDVMGFLPQHYAEAIDRYGKFVNHEEPKLAWTKDESGKMKFLFEDSFREMIAEFRTANPDFLNEGGKVPYDWTIYYLRQKALHQPISKEELAWILLNFNQKRGYYQLRGEEEEDNKKRSEYCALKVLSVEDTGEKKGKDTWYNVHLEGGLIYRRTSAMPLEWEGQTKEFIITTEYDDNGNPKEDKEGNIKRSFRMPKDDDWSLLKKKTESDIESSQVSVGQYIYAALLKNPKGKIRGKLVRTIERKYYKQELNDILRSQERFHPELRDADLYSRCINELYGSNESYRKSIAARDFVYLFVDNILFYQRPLKSKKSLIDNCPLESYHCHAQDGDVQKAPIKCIAKSAPLFQEFRLWQFLSNLRIYQREKEVNGKLLTDVDVTNEFLSSEDDYVRLFEYLNGIETIKQDTLLQKHFNVQKPKGKNAKLPYRWNYVEDREYPANKTRGQMLAFLKRANISAGFLTPDMEERLWHLLYSIDDKQELHKALATFASRHGLAQTFVEEFAKFPPFKKEYGAFSAKAIKRLLPLMRMGSRWNEKDIDEATHQRIDKIIDGECDETIRDRVREKSIHLTDIRQFSGLPLWLASYIVYDRHSEASETARWETPDDISRFLQEFKQHSMRNPVVEQVVTETLRTVRDIWKQYGNIDEVHVELGREMKNPADKRRKMTERALENENTNLRIKAILMELMNPDSGVENVRPYSPSQQELLRIYEEGVLGSERILPDFVEETLAKFRQSDSSKCPSHAEVIRYKCWLEQKYRSPYTGESISLARLFTPDYEIEHVIPQSRYFDDSFQNKVICESEVNKLKGNLLGYEFIEKHHGEKVTLTGGKVVTVFEVPAYEQFVKDTYANNPSKMRNLLLDDIPDKFIERQMNDTRYISSYVKTLLSSLVRCEGEQEAVSKNVIACTGGVTDRLKHDWGVTEVWNHIILPRFERLNDITGTQEFTAKSANGHTIPAIPLELQRGFNKKRIDHRHHAMDAIVIACANRNIVNYLNNESARKGAAISRYDLQQILCHKEKNDSGSQWVVNMPWESFPADVKATLENMVVSFKQNLRVINKTTNHYQVIEDGKKVVKTQTKGDSWAIRRSMHKDTVFGEVNLKRIKEVGINEAFKEPQRIVDKELKAKMLAMKQLGFDLKRVKQYFEEEKDTWQDVNLKKIPVYYFTKETNDRFFATRKALDESFDENKIKNHITDTGIQKILLRHLAANGNDPKLAFSPEGIEEMNRNIVALNNGKSHQPIYKVRWYEKSDKFAVGTAGCKAKQFFEADKGTNLFFAIYEKETLGEDHRVVRTRSYASIPLNEVIERQKKGLPSAPENEEGMQATYVLSPNDLVYVPRQGEEITDVNQIDKKRIYKMVSCTSGECHFIPYQVANIIVNKVEFSARNKMERAITGEMIKEICIPIEIDRLGNIRLNRS

SEQ ID NO: 16 - protein, 1490 aa, Unknown
  OMNI nuclease sequence
MSKIVGLDLGTNSIGWAVIDNEQKQIEAAGSRIIPMDAARLSDFEKGNSVSQTADRTKYRGMRRLRERYLLRRERLLRVLSVMGFLPEHYASQLNRYGHLPEDNEPRIAWREGKDGKPEFLFRTSFSEMVDEFRKAGIGQNIPYDWTIYYLRKKALTLPLTKEELAWVLMQFNQKRGYNQLRGKADESMGDDTDKGEEKEYHELKVIKVEETGDKDKKGVSWFNIVLENGWIYRRVFSIAPDWEGKVRGFIATFKLDKEGNRKEGEQPRLKSPDENDWGLRKIKTENDIKQSQCTVGEYIYKTLLNDPTRKILGETVRTVERELYQEELHRILEKQREFIPELNDKELYNRCIEELYPANEAYCNSIANRGFVYLLADDILFYQRPLKSKKSLIADCPYESRNGKPIKCIAKSHPAYQEFHLWQFLSNLQVYQDDTKITSTLLPDGNAYADLYDHLAKQKEIDQNGLLRYFKIGRKEVSKYRWNYVQDRKYPCGETRAVLLGGLHKAGIDEKFLTPEKELHLWHILYSIDDQRQYEKALNTFARKQGWDAHQCEAFVQSFKRLTLCKEKDYGAYSAKAISRLLPVMRRGRCWNAEEIDTQTRERIEHLITAEEDEGLTTSVREKLKHIRSIEDCQGLMTWQACYLVYGRHSEAAEAQKWTRPEDIDRYLEEFRHNSLNNPVVEQVVTESLRVVRDILRQTGRIDEIHIELGRELKKTKAERESLSRTILENETTNQRIRKLLTELMNPECQVENVRPNSPSQLELLKIYEDGAMNSVADVPEEIKEIQKRFSAAKNQPTHAEVMKYKAWLEQHYISPYTGKFIPLAKLFTPAYQIEHIIPQSRWFDDSMSNKVICEAEVNKLKDRELGHEFIVHHHGERVPLSMGRDVEILSVDAYEKLVKDTFANNRKKREKLLMDDIPEDFVNRQLNDSRYISRLMMHLLSNIVRAEDEDGNQEESTTSRNVIPCNGSITDRLKHDWGIDDVWNRIILPRFERLNNITNTPVYTATTERGHLIPQVPLHMRQGFNKKRIDHRHHAMDAIVIACATRDHVNLLNNEAARSSMRYDLNHKLRIMDYYLGADGQKHERFGEFYKPWETFTEDVQRSLEGIIVSFKQNLRVINKTSNHYTIIQDNKHVNVKQKKGDSWAIRKPLHKETVFGEVNLQLTKRVPIKKALEDINSIVDRELKEMIKAKKKLTHTNKQIEEFLVKNKDIWSEAADGKIEVYYYTADTNDRYFATRKPLLDVMKDIATEPAAQKAIDSITDSGIRSILRAHLGAENNNPAEAFSADGLERMNRNIKALNGGHDHLPIKKVRVYEQANKFSVGNKGQKATKFVEAAKGTNLFFVIYTNSNGTRGYATVPLNIIIELQKKYEKDWEAHLAERLQGEDLQLMPKGAKLLYVLSPGDLVYVPTEEEHKNGIENVDTTRIYKCISATERTCLFIPYSVASIILPGKEYEAKNKMERAITKEMIKEVCIPIQVDRLGNITKIG

SEQ ID NO: 17 - protein, 1565 aa, Unknown
  OMNI nuclease sequence
MKENTTNSAKTILGLDLGTNSIGWALIKHDFEKKEGDILGLSSRIIPMSQDILSAFGQGQKVSQTADRTGYRGVRRLYQRDNLRRERLHRVLNILGFLPTHYADNIDFEKHLGQFKKEVKLNYRKTKEGTHEFLFMDSFYEMLQEFKKTNPSLFYKKENGEETKIPLDWTIYYLRKKALTEKVSKEELAWILLNFNQKRGYYQLRGEEEIEDSNKNKSFEELKVSRVVDTGETIKRSGEALYDIYFENGWKYDTKTTKPDNWLNKTREFIVTTSTLKDGTVKRSYKAVDSETDWIAIKEKTEQEIARSNKEVGEYIYESLLANPTQKIRGKLISTIERKFYKKELKAILEKQIELHDELKDRALYYACIEELYPRNNAHRNSIKDNGFDYLFIDDIIFYQRPLKSKKSTISNCQYEHTTYWRRNNETGSLEKVRKPLKAIPRSHPLFIEFRMWQFLRNLKIYKQQATSDIDVTDKFLENENDWCDLFDFLMNRKDVQQKQLIKYFIDNKTIDKSKSEEYRWNYPEDATYPMNDTKAQFVSRLKKVKDFDLKEDLSFDFQMNLWHIIYSVKDKHEFEKALETFALKNDIDKDSFVDSFKNHPPYNSEYGAYSLKAIKKLLPLMRVGRYWNRDDVLEEASNRIQSIVERIEHLQIDDNKPLKDDKLKEAIAAVSDDEVPKQFIRSFLPFKNKNPLSGLNTYQACYAVYERHSEVSDISQWKSPEDIDNYLADFKQHSLRNPIVEQVVTETLRTVRDIWMHFGEEGKRLFNEIHVEIGRDMKNTADRRKTLSDRNRENERTNQRIKELLQELQSEYSQQDIRPYSPSHQEILKIYEEGVYQNPRASFDVLSEDEVRKIRNSNNLKKSDITRYKLWLEQGYISPYTGRIIPLSRLFTEDYQIEHIIPQARFFDNSLGNKVICESEINPSPYKGNQTAMEFIKRMGGSVVQLNNGRGTMRIFKQNEYEEHCKNYFRQNRRKLEFLLIEDIPERFSDRQLNDSRYISRFVKGLLSNIVREENEREATSKALLTMPGAVTAKLKHDWGLNDKWNELIAPRFIRLNEMTNSNDFGFWDNSINAFRTQVPDEIEKGGFDKKRIDHRHHAMDALTVACCTREHVQYLNTLSAGKDKYDLREKLLIKNEHGHYTKTFQLPWRSFPADAKNSLERAIISFKQNLRVINKANNKTWQWVKDKNGGFKKELVKQTKGDSWAIRKSLHKETVSGAVQIKRIKKGTATLNYYLDRPELIVDKKIKEKVIYLHGVFLGDLNKIKKHLREHPLKIDGKEINKIKVYEWTEGATATRTPLSDKLTRKQLDSITDCGIQRILNNHLKKYVDENGKEQFSLAFSQEGIEDMNANIVALNNGKRHKPIRSVRIYEEGKKFPVSDNKNSAKSTKYVEAAKGTNLFFAIYWDEEKQKRVFETIPFNEVVEHQKQRATLSKEVMKDTLYIPVKPALGEFIFSLSPNDLVYVPTDEEMANPSLVDIDNLTRKQIGRIFTVNDFSGPTIYFTPNSLANNITAKEVDLKIDEKSGKLQGSFDTKTASFEFVPIKDTCWKMKVDRLGNIVSIIR

SEQ ID NO: 18 - protein, 1436 aa, Unknown
  OMNI nuclease sequence
MKKILGLDLGTNSIGWAVVNEAENADEQSSIVKLGVRVNPLTVDELTNFEKGKSITTNADRTLKRSMRRNLQRYKLRRENLIKILKSSGFISNDTILSENGNRTTFETYRLRAKAATDEISLEEFARVLLQINKKRGYKSSRKAKSTEEGQLIDGMEVAKRLYNENLMPGQLSLELLKGGKKYLPDFYRSDLQAEFDKVWNIQKHFYPDQLTDGLKDELQGKNKSQTWAICAKPFGIVGIKRTTKGFEQKIENFQWRCKALSEQLGLEELAIVLQEINGQISNASGYLGNISDRSKELYFNHQTVGQYQMAQLDKNPNYSLKNQVFYRQDYLNEFETIWETQARFHKELTAELKKEIRDVVIFYQRPLKSQKGLISFCEFESRQIEVEVDGKKRQKTIGLRVCPKSSPLFQEFKIWQRLNDVEVSGMIIPNQQQDLFGYSKDYNYGKRWLLPEEKELLFAELNYKEKLSKAEALKMLFPHQKEVDMNFKELDGNRTQAELFKAYQAIAEMSGHDVGDLQKKSAKEMQQSISEIFDTIGIDTRILTFNSDLEGKDFEQQPMFRLWHLLYSFEGDNSSIGNEKLIEKLHGTFGFEKEYATVLANVVFKEAGDYSSLSTKAIRKILPHLKDGNDYSVACEYAGYRHSKQSLTKEEIENKVLKDKLELLPRNSLRNPVVEKILNQMVNVVNGIIEEYGKPDEIRIELARELKKSAKEREELTKSINETTRLHEELVKKLQNEFGLSHVSRNDIIRYKLYEELKNNGYHTLYTDTYIPREKLFSKEFDIEHIIPQAKLFDDSFSNKTLEARQANLDKSNTTAFDFVATKYGEDFANGDYKNRIDKLLDDKVISKTKHDKLLMKEADIPSGFINRDLRDSQYIAKKAREILEELVRFVLPTTGSITDRLREDWQLVDVMQELNWDKYNQLGLTEIIEGRDGQRIRRINDWTKRNDHRHHAMDALTIAFTKRSFIQYLNNLNARVQKGVDDWIDLDMVEFADLNKEDKTKAVYAIEKKELYRDNRGKLRFNPPMPLNEFRAEAKRQLENTLISIKAKNKVVTRNVNVTKKKSGKNKKVQLTPRGQLHLETIYGSSKRYVTKEEKVNASFDAEKINMVASNRYREALMARLNQFGGDAKKAFTGKNALDKNPIWLDELHTAQVPEKVKTVGFETIYTIRKEVSPDLKLDKVVDVSIRKILEDRLKEFGGDAKKAFSNLDENPIWLNKEKGIAIKRVTITGISNAEALHDKCDKDGNLLLDENGNKQPIDFVNTGNNHHVAIYRKPKLDKNGQPALDENGNIMYELDEKIVSFYEATSRAMQHLPIIDKEYKREEGWQFLFTMKQNEYFVFPRYDADGNMTFNPLEHDEAWYKNPENYAAISPNLFRVQKMTNKDYFFRHHLETTVQDNAKLKGITWKRFGLNGIENILKVRVNHIGQIVSIGEY

SEQ ID NO: 19 - protein, 1442 aa, Unknown
  OMNI nuclease sequence
MKKILGLDLGTNSIGWAVVNEAENENEKSSIVKLGVRVNPLTVDELTNFEKGKSITTNADRTLKRSMRRNLQRYKLRRENLIELLKANHFIDDDTVLSENGNRTTFETYRLRAKAATTEISLAEFARVLLQINKKRGYKSSRKAKSTEEGQLIDGMEIAKRLYDENLTPGQLSLELLKCGKKYLPDFYRSDLQAEFDKVWDVQKQFYPELLTDELKENIRGKIASSTKTICEKCFCVEGIKTTRTQEYKIKYYELRVKSISQKISLDETALVLSEINGQINNASGYLGDISDRSKELYFNHQTVGQYQMSQLDKNPNYSLKNQVFYRQDYLNEFETIWETQAKFHKELTPELKKEIRNVVIFYQRPLKSQKGLISFCEFESRQIEVEVDGKKKLKTVGCRVCPKSSPLFQEFKIWQRLNDVELTGMIVPNQQQDLFGYSKDYAYGKRRLFPEEKDMLFAELNYKEKLSKAEALKMLFPKRKDVDINFKELDGNHTQAELFKAYISIAERSGHDLGDMSKKTAKEMLDCIADIFSTIGIDTNILTFNPDLEGKEFEQQPMYQLWHLLYSFEGDNSNLGNEKLIEKLFDKFGFEREYAAILATVVFKEAGDYSSLSTKAIRKILPHLKDGNDYSVACEYAGYRHSKQSLTKEEIQNKVLKDKLELLPRNSLRNPVVEKILNQMINVVNSIIDEYGKPDEIRIELARELKKSAKEREELFKSINETTRIHEELVKKLQNEFGLSHVSRNDIIRYKLYMELASNGYHTLYTDTYIPREKLFSKEFDIEHIIPQAKLFDDSFSNKTLEARQANLDKSNTTAFDFVATKYGDDFANGEYKTRIDKLLADKVISKTKHDKLLMKEADIPSGFINRDLRDSQYIAKKAREILEELARFVVPTTGSITDRLRDDWQLVDVMQELNWNKYDQLGMTEIIECRDGQRIRRIKEWTKRNDHRHHAMDALTIAFTKRSFIQYLNNLNARVQKSVDDYIDLDMVELSDLNKEKRASAMYGIEKKELYRDNHGKLRFNPPMPLNEFRAEAKRQLENTLISIKAKNKVVTRNINVSKKKSGVNKNVQLTPRGQLHLETIYGSSKRYVTKEEKVNASFDATKIQMVSSKRYREALLARINQFGGDAKKAFTGKNALDKNPIWLNAQHTDKVPEKVKIVGFETIYTIRKEISPDLRIEKVVDAHIRQILQSRLDEFGGDAKKAFSNLDENPIWLNKDKSIAIKRVTITGISNGEPLHDKRDKNGNLILDENDNPQPVDFVNTGNNHHVAIYRKPKLDKNNQPILDNNGNMQYELDEKIVSFYEATSRAMQHLPIIDKTYKQEEGWQFLFTMKQNEYFVFPRYDADGNMTFNPLEHDEAWYKNPENYAEISPNLFRVQSISKVMYGNNAVRDYIFRHHLETTVTSKLKGLTYQQYKSLVFADKIVKVRVNHIGQIVSIGEY

SEQ ID NO: 20 - protein, 1394 aa, Unknown
  OMNI nuclease sequence
MSKILGIDLGTNSIGLAIRDTDKGETFVEQVDFFSSIIFKSGVGSGQAGEFSYAAERTKKRSIRRLYQSRKYRIWTTLALLIENGYCPLSIEDLDKWRRYDKEKGLKRQYPIEAIQFEQWIRLDFDGDGKPDYINPYELRAEIMQKQFDFNEEINRYKLGRILYHITQRRGFKSSKGETLKELSENEINEDLDLSVALQKSEEKKSQKLKDFMKEHNIPTVGWAFYELTKRGIRIKESEYQAVRIQYKEEIQKIFEFQEGLDTTSDFYKHLMSEKKGEGTIFYKRPLRSQKSKVGTCTLETGKSRCPISHPEFEEYRAWSFINNIKYRTSTTAEWKTLPLNLKQELFKDKFLRTKSYFKFEEIKNWLSSKLCLQLEYTNKKETSTINYKDKTNVVGCPISARLKNILGEDYKQWKFNSDKERTNRKTGEVHRITYDYLDIWHICFSFDEAEFVEEFAKCTLKLDDKQAKKLCTLHNNIQQEYASLSLKAIRNINPFLQKGLIYTDAVLLAKLPEIFKDKWNEVENDIVAAIDDIIKENRYEKGILDIVNDLIANYKSLDYGERFAEHNTEYILQSQDYTDIESKLKGHFGERTWNAKPCEEQEQIRKDVRELYQIFFGSSSRGYFKQPKVSESLAEYLKKQYTYLNDDDLKKIYHPSMIEFYPKVKPTLLDDNKYVKLLGSPVIGALKNPMAMRILHTLRTQINQLIKEGKIDEYTKIVVETAREVNNTNKRWAIEEYQRKQEEENKEVEKIIRQYYQKDNISDDEIKKAKILLDQFDVEKDNKQEKKQDTQSDKLSDTWSKVKSNNIKRYKLWLEQNCCCMYTGKVIRISELFDNDKFDIEHTIPRSISFDDSLSNLTICDSHFNRSIKKNQIPTQLDNYNEIKSRLELWKQKVKSLKERVEYWKEQSKISQTKDRKDQCIKQRLLWQMELDYWEKKLASFTIKEFIDGFRNNQLNDTRIITKYAFHYLKTVFEHVSVQRGEITSNFRKIVGIQKEDEKKDRSNHSHHAIDAAILTLIPSAKQRNRILETFYQMKESKETNNKDKLEKTTKELEKAKRAALIPNAVAAIKDHIEQNIFVNHISKDQTLTPAKRRKRIRGKIDKNKQWIITGDCIRGSLHKDSFYGCILIDGKKYFVIRRALKYKANDKDKGFKTWNELENAIVDKALYRRLVKPFCQEGAEEPSIDFKTVMLEKGGLYDNGIKVRHIRCYTSVKNPLQIKKQTYKSKQGYKNYYYAEVGDLYTMCKYENKKTGEIVYQPYNLFEVAANHKITHEFIPSKYDDKVLTQQLVKGDMLLIYKDNPNELFEMDNVQLSKRLYVIDGFERKSCLTKLIRSSNAQQDKELGKGESIKDFNNLPQKIRQSINKLHYLLRGIDFKIINGRIEFLNKTKYYD

SEQ ID NO: 21 - protein, 1395 aa, Unknown
  OMNI nuclease sequence
MSKILGIDLGTNSIGLAIRDTDKGETFVEQLDFFSSIIFKSGVGSGPSGEFSYAAERTNSRSIRRLYQSRKYRIWTTLALLIEHEYCPLSMEDLDKWRRYNKEKGLKRQYPIDAIKFEQWVRLDFDGDGKPDYTNPYELRAEIMQKQFDFNSEIDRYKLGRILYHIAQRRGFKSSKGETLKELSEKEMNEDLDLSDALQKSEEKKSQKLKDFMKTHNIPTVGWAFYELTKQGIRIKESEYQAVRIQYKEEIQKIFEFQKGLDINSAFYKHIMSEKKNEGTIFYKRPLRSQKGKVGTCTLEQGKTRCPISHPEFEEYRAWSFINNIKYRTSTTAEWQTLSLKLKEELFKDKFLRTKSYFKFEEIKNWLSAKLSIQLECNDKKENSTINYKDKTNVIGCPISARLKNILGEDYKQWKFKSDKERTNLKTGEVHRIIYNYIDIWHICFSFDEAEFVEEFAKDSLKFDNKQAKQLCTLHNNIQQDYASLSLKAIRNINPFLQKGLIYTDAVLLAKLPEIFKDKWCEIEDDVIADIDNIIKENRYQKEISDIVNDLIADYKSLDYNERFAEHNTEYILQNQDYTDIENKLKSHFGEKTWITKPCEEQEQIRKDVCELYQIFFGNSTRDYFKQPKISESLAEYLKNKYTYLNDDDLKKIYHPSMIEIYPIAKKEIIDGDKSVRRLGSPVIGALKNPMAMRILHTLRSQINKLIDESKIDEHTRIIVETAREVNDANKRWAIEEYQRKQEEENKEIEKIISKYFEEGNISDNDIRKAKVLLDQFDIEKNDKQAKEKKTKSDDKLSDTWSKVKSDNIKKYKLWLEQNCCCMYTGKVITISELFDGDKFDIEHTIPRSVSFDDSLSNLTICESHFNRSIKKNQLPTQLDNYNEIEARLETWRKKVLSLKDRVNFWKEQSKRAQTKDRKDQCIRQRLLWQMELDYWKKKLASFTITEFIDSFRNNQLNDTRIITKYAFHYLKTVFEHVSVQRGEITSNFRKIVGIQKEDEKKDRSNHSHHAIDAAILTLIPSAKQRNRILETFYQMKESKESNNKDKLEKTTKELEKAKRAALIPDAIAAIKDHIEQNIFVNHISKDQTLTPAKRRKRIRGKIDKNKQWIITGDCIRGSLHKDSFYGCILIDGKKYFVIRRALKYKANDKDKGFKTWNELENAIVDKALYRRLVKPFYQEGAEEPSIDFKTVMLEKGGLYDNGIKVRHIRCYTSVKNPLQIKKQTYKSKQGYKNYYYAEVGDLYTMCKYENKKTGEIAYQPYNLFEIAANHKITHEFIPSKYDDKVLTQQLIKGDMLLIYKNNPNELFEMDNIQLSKHLYVIDGFERNSCLIKLICNSNAQQDKELGKGESIKDFNNLPQKIRQTINKLHYLLRGVDFEIINGRIEFSNKTKYYD

SEQ ID NO: 22 - protein, 1489 aa, Unknown
  OMNI nuclease sequence
MKNILGLDLGTNSIGWAVISHDGMCYSGIKCAGSRIIPMDAATMGDFDKGVTKSSASERTQQRGIRRLNERSLLRRERLHRVLDIMGFLPEHYSRNLTRYGKFISEKVKLAWTDEGRFLFDASFNEMLHEFRSQHPSLMESGKKIPYDWTVYYLRKKALSYPINKFELAWILLNFNQKRGYYQLRGEEDDEKASNKWEEYMSLKVLRVEDSGEKTGKYTWYRVHLDNGMIYNRKSNIPLDWEGKTRDFIVTTELNNDGTPKTDKEGNFKRSFRSPSENDWTLIKKKTEADIEKSQKTVGTYIYESLLQNPTQKIRGKLVRVVERKFYRSELKLILEKQCRFLPELQDAALLQACLEELYPHNRMHRDIISNKGFTSLFIDDIIFYQRPLKSKKSLIGNCPYEWHSYVDKTTGKTKTVYNKCIAKSHPLYQEFRLWQFLSNLRIYSKGTYEQDVTTRLLPDQESYAALFSWLNDRTSIKQKDFLNYSGFKLTKTEQKNYRWNYVEDKTYPCNETRGEILKRILDCNLPEIFLTKERELSLWHILYSVEDKEQYKKALEKFAEKNSIDSADFVAAFEKMAAFKKEYGSYSAKAVSKLLPLMRRGSSWSETEIDKNTLERINKLIDGEYDEQLCEQAYEGVAGLSDVSQFQGLPVWLACYIVYNRHSEATDVSRWESPDDIDKYLSDFRQHSLRNPIVEQVVLECLRTVRDIWRQVGHIDEIHVELGREMKNPADKRKKMTESILENEKANLRAKAMLMELMNPEMKVEGVRPHSPGQQELFRIYEENVLNSEKVPDDITEILAKFNQTDNAKRPTSSEVNRYRLWLDQKYRSPYTGEMISLSKLFTSAYEIEHIIPQSRYFDDSFSNKVICESEVNKLKSNLLGHEFIKKHQGEKVQLSMGKTVEILSVEAYEKFVNEHYSYNRVKKEKLLMDDIPEKFIERQMNDSRYISKLVKALLSNIVREEGEKDATSKNVISCTGGITDRLKKDWGINDVWNGIILPRFIRMNEIDKTNSYTAINTSGNIIPDMPFEYQRGFSKKRIDHRHHAMDAIVIACASRNVVNYLNNSSAAKESEAGRMDLRNKLCNKNYTDDKGNYKWIIRKPWETFTQDVKETLQDIVVSFKQNLRIINKSSNRTLHFEEGKKKLQKQTKGDNWAIRKPMHKDTVYGEVNLQRTKEVSFKEALKPDYAIVNRDLRKKVLSLQASGYDVKQMMKYFESEKDVWQDVDFKKIKVRYFTKTTNDRYFATRKPIDSSFNKKKIEESITDTGIQKIMLRHLENMGGNPELAFSSDGLDEMNKNIRALNNGRFHQPVYKVRIYEKADKYAIGEKGQKAKKFVEAAKGTNLFFAIYENETVDKSTGEILRKRSFTTIPMNIVMNRLKQGLSPVPANDCGKDAKYVLSPNDLVYVPTKAELEHGVDMASLDKDRIYKMVSADRSNSHFVKESVASPIVNKVEFGSHNKMQCAVTGEMIKEICIPLKVDRLGNIIKMG

SEQ ID NO: 23 - protein, 1489 aa, Unknown
  OMNI nuclease sequence
MKNILGLDLGTNSIGWAVISHDGMCYSGIKCAGSRIIPMDAATMGDFDKGVTKSSASERTQQRGIRRLNERSLLRRERLHRVLDIMGFLPEHYSRNLTRYGKFISEKVKLAWTDEGRFLFDASFNEMLHEFRSQHPSLMESGKKIPYDWTVYYLRKKALSYPINKFELAWILLNFNQKRGYYQLRGEEDDEKASNKQEEYMSLKVLRVEDSGEKSGKYTWYRVHLDNGMIYNRKSNIPLDWVGKERDFIITTELNNDGTPKTDKEGNFKRSFRSPSENDWTLIKKKTEADIEKSQKTVGTYIYESLLQNPTQKIRGKLVRVVERKFYRSELKLILEKQCRFLPELQDAALLQACLEELYPHNRMHRDIISNKGFTSLFIDDIIFYQRPLKSKKSLIGNCPYEWHSYVDKTTGKTKTVYNKCIAKSHPLYQEFRLWQFLSNLRIYSKGTYEQDVTTRLLPDQESYAALFSWLNDRTSIRQKDFLNYSGFKLTKTEQKNYRWNYVEDKTYPCNETRGEILKRILDCNLPEIFLTKERELSLWHILYSVEDKEQYKKALEKFAEKNSIDSADFVAAFEKTTAFKKDYGSYSAKAISRLLPLMRRGRFWSEEKIDKNTLERIEKLINGEYDEQLCEQAYEGVAGLSDVSQFQGLPVWLACYIVYNRHSEATDVSRWESPDDIDKYLSDFRQHSLRNPIVEQVVLECLRTVRDIWRQVGHIDEIHVELGCEMKNPADKRKKMTESILENEKANLRAKAMLMELMNPEMKVEGVRPHSPGQQELFRIYEENVLNSEKVPDDITEILAKFNQTDNAKRPTSSEVNRYRLWLDQKYRSPYTGEMISLSKLFTSAYEIEHIIPQSRYFDDSFSNKVICESEVNKLKSNLLGHEFIKKHQGEKVQLSMGKTVEILSVEAYEKFVNEHYSYNRVKKEKLLMDDIPEKFIERQMNDSRYISKLVKALLSNIVREEGEKDATSKNVISCTGGITDRLKKDWGINDVWNGIILPRFIRMNEIDKTNSYTAINTSGNIIPDMPFEYQRGFSKKRIDHRHHAMDAIVIACASRNVVNYLNNSSAAKESEAGRMDLRNKLCNKNYTDDKGNYKWIIRKPWETFTQDVKETLQDIVVSFKQNLRIINKSSNRTLHFEEGKKKLQKQTKGDNWAIRKPMHKDTVYGEVNLQRTKEVSFKEALKPDYAIVNRDLRKKVLSLQASGYDVKQMMKYFESEKDVWQDVDFKKIKVRYFTKTTNDRYFATRKPIDSSFNKKKIEESITDTGIQKIMLRHLENMGGNPDLAFSSDGLDEMNKNIRALNNGRFHQPVYKVRIYEKADKYAIGEKGQKAKKFVEAAKGTNLFFAIYENETVDKSTGEILRKRSFTTIPMNIVMNRLKQGLSPVPANDCGKDAKYVLSPNDLVYVPTKAELEHGVDMASLDKDRIYKMVSADRSNSHFVKESVASPIVNKVEFGSHNKMQCAVTGEMIKEICIPLKVDRLGNIIKMG

SEQ ID NO: 24 - protein, 1489 aa, Unknown
  OMNI nuclease sequence
MKNILGLDLGTNSIGWAVISHDGMCYSGIKCAGSRIIPMDAATMGDFDKGVTKSSASERTQQRGIRRLNERSLLRRERLHRVLDIMGFLPEHYSRNLTRYGKFISEKVKLAWTDEGRFLFDASFNEMLHEFRSQHPSLMESGKKIPYDWTVYYLRKKALSYPINKFELAWILLNFNQKRGYYQLRGEEDDEKASNKQEEYMSLKVLRVEDSGEKSGKYTWYRVHLDNGMIYNRKSNIPLDWVGKERDFIITTELNNDGTPKTDKEGNFKRSFRSPSENDWTLIKKKTEADIEKSQKTVGTYIYESLLQNPTQKIRGKLVRVVERKFYRSELKLILEKQCRFLPELQDAALLQACLEELYPHNRMHRDIISNKGFTSLFIDDIIFYQRPLKSKKSLIGNCPYEWHSYVDKTTGKTKTVYNKCIAKSHPLYQEFRLWQFLSNLRIYSKGTYEQDVTTRLLPDQESYAALFSWLNDRTSIRQKDFLNYSGFKLTKTEQKNYRWNYVEDKTYPCNETHGEILKRILDCNLPEIFLTKERELSLWHILYSVEDKEQYKKALEKFAEKNSIDSADFVAAFEKATAFKKDYGSYSAKAISRLLPLMRRGRFWSEEKIDKNTLERIEKLINGEYDEQLCEQAYEGVAGLSDVSQFQGLPVWLACYIVYNRHSEATDVSRWESPDDIDKYLSDFRQHSLRNPIVEQVVLECLRTVRDIWRQVGHIDEIHVELGREMKNPADKRKKMTESILENEKANLRAKAMLMELMNPEMKVEGVRPHSPGQQELFRIYEENVLNSEKVPDDITEILAKFNQTDNAKRPTSSEVNRYRLWLDQKYRSPYTGEMISLSKLFTSAYEIEHIIPQSRYFDDSFSNKVICESEVNKLKSNLLGHEFIKKHQGEKVQLSMGKTVEILSVEAYEKFVNEHYSYNRVKKEKLLMDDIPEKFIERQMNDSRYISKLVKALLSNIVREEGEKDATSKNVISCTGGITDRLKKDWGINDVWNGIILPRFIRMNEIDKTNSYTAINTSGNIIPDMPFEYQRGFSKKRIDHRHHAMDAIVIACASRNVVNYLNNSSAAKESEAGRIDLRNKLCNKNYTDDKGNYKWIIRKPWETFTQDVKETLQDIVVSFKQNLRIINRTSNRTLHIEADKKKLQRQTKGDNWAIRKPMHKDTVFGEVNLQRVKEVSFKEVLKPEYSIVNRDLRKKVLSLQASGYDVKQMMKYFESEKDVWQDADFKKIKVRYFTKTTNDRYFATRKPIDSSFNKKKIEESITDTGIQKIMLRHLENMDGNPDLAFSSDGLDEMNKNIRALNNGRFHQPVYKVRIYEKADKYAIGEKGQKAKKFVEAAKGTNLFFAIYENETVDKSTGEILRKRSFTTIPMNIVMNRLKQGLSPVPANDCGKDAKYVLSPNDLVYVPTKDELERGVDGTTLDKDRIYKMVSSNNYQCFFVKNSVASPIVNKMEFSSQNKMERAVTGEMIKEICIPLKVDRLGNIIKMG

SEQ ID NO: 25 - protein, 1489 aa, Unknown
  OMNI nuclease sequence
MKNILGLDLGTNSIGWAVISHDGMCYSGIKCAGSRIIPMDAATMGDFDKGVTKSSASERTQQRGIRRLNERSLLRRERLHRVLDIMGFLPEHYSRNLTRYGKFISEKVKLAWTDEGRFLFDASFNEMLHEFRSQHPSLMESGKKIPYDWTVYYLRKKALSYPINKFELAWILLNFNQKRGYYQLRGEEDDEKASNKQEEYMSLKVLRVEDSGEKTGKYTWYRVHLDNGMIYNRKSNIPLDWVGKERDFIITTELNNDGTPKTDKEGNFKRSFRSPSENDWTLIKKKTEADIEKSQKTVGTYIYESLLQNPTQKIRGKLVRVVERKFYRSELKLILEKQCRFLPELQDAALLQACLEELYPHNRMHRDIISNKGFTSLFIDDIIFYQRPLKSKKSLIGNCPYEWHSYVDKTTGKTKTVYNKCIAKSHPLYQEFRLWQFLSNLRIYSKGTYEQDVTTRLLPDQESYAALFSWLNDRTSIRQKDFLNYSGFKLTKTEQKNYRWNYVEDKTYPCNETRGEFLKRILDCNLPEIFLTKERELSLWHILYSVEDKEQYKKALEKFAEKNSIDSADFVAAFEKATAFKKDYGSYSAKAISRLLPLMRRGRFWSEEKIDKNTLERIEKLINGEYDEQLCEQAYEGVAGLSDVFQFQGLPVWLACYIVYNRHSEATDVSRWESPDDIDKYLSDFRQHSLRNPIVEQVVLECLRTVRDIWRQVGHIDEIHVELGREMKNPADKRKKMTESILENEKANLRAKAMLMELINPEMKVEGVRPHSPGQQELFRIYEENVLNSEKVPDDITEILAKFNQTDNAKRPTSSEVNRYRLWLDQKYRSPYTGEMISLSKLFTSAYEIEHIIPQSRYFDDSFSNKVICESEVNKLKSNLLGHEFIKKHQGEKVQLSMGKTVEILSVEAYEKFVNEHYSYNRVKKEKLLMDDIPEKFIERQMNDSRYISKLVKALLSNIVREEGEKDATSKNVISCTGGITDRLKKDWGINDVWNGIILPRFIRMNEIDKTNSYTAINTSGNIIPDMPFEYQRGFSKKRIDHRHHAMDAIVIACASRNVVNYLNNSSAAKESEAGRMDLRNKLCNKNYTDDKGNYKWIIRKPWETFTQDVKETLQDIVVSFKQNLRIINKSSNRTLHFEEGKKKLQKQTKGDNWAIRKPMHKDTVYGEVNLQRTKEVSFKEALKPDYAIVNRDLRKKVLSLQASGYDVKQMMKYFESEKDVWQDVDFKKIKVRYFTKTTNDRYFATRKPIDSSFNKKKIEESITDTGIQKIMLRHLENMGGNPELAFSSDGLDEMNKNIRALNNGRFHQPVYKVRIYEKADKYAIGEKGQKAKKFVEAAKGTNLFFAIYENETVDKSTGEILRKRSFTTIPMNIVMNRLKQGLSPVPANDCGKDAKYVLSPNDLVYVPTKAELEHGVDMASLDKDRIYKMVSADRSNSHFVKESVASPIVNKVEFGSHNKMQCAVTGEMIKEICIPLKVDRLGNIIKMG

SEQ ID NO: 26 - protein, 1489 aa, Unknown
  OMNI nuclease sequence
MKNILGLDLGTNSIGWAVISHDGMCYSGIKCAGSRIIPMDAATMGDFDKGVTKSSASERTQQRGIRRLNERSLLRRERLHRVLDIMGFLPEHYSRNLTRYGKFISEKVKLAWTDEGRFLFDASFNEMLHEFRSQHPSLMESGKKIPYDWTVYYLRKKALSYPINKFELAWILLNFNQKRGYYQLRGEEDDEKASNKQEEYMSLKVLRVEDSGEKSGKYTWYRVHLDNGMIYNRKSNIPLDWVGKERDFIITTELNNDGTPKTDKDGNVKRSFRSPSENDWTLIKKKTENDIEKSRKTVGTYIYDSFLQNPTQKIRGKLVRVVERKFYRSELKLILEKQCRFLPELQDAALLQACLEELYPHNRMHRDIISNKGFTGLFIDDIIFYQRPLKSKKSLIGNCPYEWHSYVDKTTGKTKTVYNKCIAKSHPLYQEFRLWQFLSNLRIYSKGTYEQDVTTRLLPDQESYAALFSWLNDRTSIRQKDFLNYSGFKLTKTEQKNYRWNYVEDKTYPCNETRGEILKRILDCNLPEIFLTKERELSLWHILYSVEDKEQYKKALEKFAEKNSIDSADFVAAFEKATAFKKDYGSYSAKAISRLLPLMRRGRFWSEEKIDKNTLERIEKLINGEYDEQLCEQAYEGVAGLSDVSQFQGLPVWLACYIVYNRHSEATDVSRWESPDDIDKYLSDFRQHSLRNPIVEQVVLECLRTVRDIWRQVGHIDEIHVELGREMKNPADKRKKMTESILENEKANLRAKAMLMELINPEMKVEGVRPHSPGQQELFRIYEENVLNSEKVPDDITEILAKFNQTDNAKRPTSSEVNRYRLWLDQKYRSPYTGEMISLSKLFTSAYEIEHIIPQSRYFDDSFSNKVICESEVNKLKSNLLGHEFIKKHQGEKVQLSMGKTVEILSVEAYEKFVNEHYSYNRVKKEKLLMDDIPEKFIERQMNDSRYISKLVKALLSNIVREEGEKDATSKNVISCTGGITDRLKKDWGINDVWNGIILPRFIRMNEIDKTNSYTAINTSGNIIPDMPFEYQRGFSKKRIDHRHHAMDAIVIACASRNVVNYLNNSSAAKESEAGRMDLRNKLCNKNYTDDKGNYKWIIRKPWETFTQDVKETLQDIVVSFKQNLRIINKSSNRTLHFEEGKKKLQKQTKGDNWAIRKPMHKDTVYGEVNLQRTKEVSFKEALKPDYAIVNRDLRKKVLSLQASGYDVKQMMKYFESEKDVWQDVDFKKIKVRYFTKTTNDRYFATRKPIDSSFNKKKIEESITDTGIQKIMLRHLENMGGNPELAFSSDGLDEMNKNIRALNNGRFHQPVYKVRIYEKADKYAIGEKGQKAKKFVEAAKGTNLFFAIYENETVDKSTGEILRKRSFTTIPMNIVMNRLKQGLSPVPANDCGKDAKYVLSPNDLVYVPTKAELEHGVDMASLDKDRIYKMVSADRSNSHFVKESVASPIVNKVEFGSHNKMQCAVTGEMIKEICIPLKVDRLGNIIKMG

SEQ ID NO: 27 - protein, 1496 aa, Unknown
  OMNI nuclease sequence
MKKILGLDLGTNSIGWAVVNADIENGETKIKSIESAGSRIIPMDAEIMGKFETGNSVSQTAERTKCRGTRRLLERFLLRRERLNRVLNLMGFLPEHYSAKLDRYGKFIDESEPKLPWSKDENGKSKFLFQESFLEMCDEFKRVNTGIKNIPSDWTIYYLRKKALTKPISKFELAWILLNFNQKRGYYQFREEEIDNNKNKKEEYYKLQVLRVEKDNEEKGFTWYNMHLENGMIYKRKSKMPLDNWEGKIKEFIITTELNDDGSEKIDKYGDVKRSFRVPEENDWGLMKVKTEKEINDSKKTVGCFIYDALLQNPQQKIIGGLVRVVERKYYKEEILQILKVQKEFIPELKDKDLLIQCIESLYQSNEIRRNILNQKDFTYLFAEDILFYQRPLKTKKYLISNCPYETRNYKDKDADKITEPLKCVVKSHPLFQEFRLWQFISNLKIYKKGVIDQDCTNQFLKTEDDIVSLFDFLNNKKEIEQDSLLSAHFKIKKKDKENYRWNYVEDKKYPCNTTHASLLSRLKKIGVSANFLTKEIEEHLWHILYSINDKEEIYKALLKFAKKYGIEDSISFAEELQKEIFQKEYASYSLKAIKKLLPLMRCGDYWKEDNIDTKTKERIEKIITGEFDEEIDNKVREKLENYTNVSQFKGLPLWLACYVVYGRHSEAKEITKWNQPEDIDEYLKQFKQHSLNNPIVEQVVTETLRVVRDIWKQVGTIDEIHVEMGRELKKTNKERETISKQNIENENTNLRIKQILKEFKESYPDIEEVRPHSPSQQTIFRIYENYALANLSKTDKDYKEIIDISKKANPTSNEVARYKLWLEQKYQSPYTGEMIPLSKLFTSAYQIEHIIPQARYFDDSFNNKVICEAEVNGLKDRMLGYEFIKNNGGAIIELSGGKTVKIFTDEQYVDFVNKHYFNVKKKNLLLTDIPDDFINRQLNDSRYISKLVKNLLSNIVREKLENGEYEAEVTSKNLITCTGKITDRLKQDWGLNDVWNRIILPRFERLEELIGKEEFTTYNEEGHKIPAMPLDLQQGFKKKRIDHRHHAMDAIVIACATRNHVNLLNNESALSENKANRYQLQYKLRKREKAKINGEEKEVFKAFYKPWDTFTQDAEQVLRNIVVSFKQNLRVLTKATNKTQYIDKKTGKIKLKPQEKGELLAIRKSLHKETVFGEVNLREIKDIKLSEALNKPQSIVDKELKAEVYRLKALGKDDKAIIKHFKDNKDIWNSEIKNDKVKVYYFTKETNDRYFATRKAIGDIVSKKEDIKSITDSGIRKILENHLEANDGNLEKAFSPEGIEEMNKNIYELNNNKPHQPIYKARKFEKADKFAVGNRGNKNKKFVEAAKGTNLFLAIYELNDKRSYVTIPLNLVIDCQKKYKNNWKEQLDSVLKEEKYVKDSKTKLLFVISPNDLVYLPIQEELKTKQYSFDRSRIYKFVSSSGNQAFFVPYFIANAIIKTTELGANNKAERAWSGEMIKETCIPIQVDRLGNIKPL

SEQ ID NO: 28 - protein, 1446 aa, Unknown
  OMNI nuclease sequence
MKKILGLDLGTNSIGWAVVNEAEKEGEQSSIVKLGVRVNPLTVDEQQNFEKGKSITTNANRTLKRSMRRNLQRYKLRRENLISILKENGFISDDTILSENGNRTTFETYRLRAKAASEEISLQDFARVLLMINKKRGYKSSRKAKSTEEGQLIDGMEVAKRLYDECLTPGQLSYEIIKGGKKHLPDFYSSDLQDEFDKIWNVQKTFYHELLTDNLRENLKGKNKTQTWAICAKPFGIEGIKRTTKGVEQKLENYKWRVTALNEKLDLEELAVVLQEINGQISNSSGYLGGISDRSKELYFNKQTVGQYLMENLDADSNYSLKNQVFYRQDYLNEFEKIWETQAQYHKELLTPKLKKEIRDVVIFYQRSLKSQKGLISVCELEGKQVESEKNGKKYIKTIGPKVCPKSSPLFQEFKIWQMLNNVQISCKSVPDKQKNIWNDNQGKRFLSQEEKEKLFVELSYKESLSKADALKLLFNNSKDYDLNYKILEGNRTQSDLFKAYQTIIEMSGYDEYDLSIMNSEKAVHKLKEIFDGLGYNSDILMFDSSLEGHKLEQQSMFRLWHLIYSFEGDNSVIGNEKLIEKIQDTFGFEREYATVIANVVFKDAGEYSSLSAKAIRKILPHLKDGNDYSVACEYAGYNHSKSSLTKEEIENKVLKDKLDLLPRNSLRNPVVEKILNQMINVVNSIVDTYGKPDEIRIELARELKKSAKEREELTKSINSTTKLHEEYVTILKNEFGLSRVSRNDIIRYKLYKELECNGYKTLYTNTYIPKEKLFSKEFDIEHIIPQAKLFDDSFSNKTLESRQANLDKSNTTAYDFVAAKYGDDYANGEYKSRIEKLYKDGIITKTKRDKLLMKEADIPSGFINRDLRDSQYIAKKAREILEDLVHFVVPTTGSVTDRLREDWQLVNVMQELNWNKFNQLGMTYYEQDRDGRQIPKIKDWTKRNDHRHHAMDALTIAFTKRSFIQYLNNLNARVEKGVEDWIDLDMVDVSKLDKEKRTSVVYSIEKKELYRDKKGKLRFCPPMPLHEFRAEVKRQLESILVSNKAKNKVVTNNVNKAKNNVESFIQTKDGEVRKIKGQVVKTPRGQLHNETVYGCSKRYEAKEEKVNASFDAEKIKTVACKRYREALMEQLNKFGGDAKKAFTGKNAIDKAPIWLDALHTEKVPEKVKTVGFVYIYTIRKEVGPDLKVDKVVDTRIKKILESRLNEFGGDAKKAFSNLDENPIWLNKEKGISIKRVTITGVSNAEALHDKRDKDGNLIFGDDGQKQPVDFVSTSNNHHVAIYRKPKLDKNNQPMLDEKGNILYELDEKIVSFYEATSRAVQHLPIIDKTYKKDEDWQFLFTMKQNEYFVFPRYDENGNMIFNPLDYDESWYRNPDNYAEISPNLFRVQKIATKNYFFRHHLETTVETPKALAGITYKPQLGLNGIVGIVKVRVNHIGQIVAVGEY

SEQ ID NO: 29 - protein, 1371 aa, Unknown
  OMNI nuclease sequence
MKKVLGLDLGTASIGWAFVNQAESSGEHSSIIATGVRVNPLTTDEKDSFEKGKAITTNADRRQKRGMRRNLQRYKLRREHLLSVLRREGWINEDTVLSEQGARSTYQTFRFRAAAPAEEISLEDLSRVLLMINRKRGYKSNRKTDKGEEGHLIDGMEVARTLYDEGLTPGEYSLRLVDEGKRVLPDYYRSDLVAELEKIWLSQKVWYPDILTDEFKNSIENDGRNGVIKKFLSRYSIYTADNKGKDKKKTALEWRVKALTDQLDKETLAYVIADLKGAIQGSSGYLGAISDRSKELVFDNFTVGQYLWRQIEQDPNYSTRNKVFYRQDYMDEFERIWECQKRFHPELNDELKSEIRDVVIFYQRRLKSQKNLISFCEFETRDITVEEAGVQKVRKCGCRVAPRSSLLFQEFKIWSVLNNISVKSRTDGSTVEVTDEMKRRLFDYLSVNDKITVSDMLRLFELKPKGYDVNYRDIQGNLTLAELYRKFFEVVSASGNGEHDLAKLSYSGAYKILFEVYSALGFSTEILSFDSSLPKEEYERQPLFKLWHLLYSYEGDNSKTGDESLIRRVAEICMMPEEYARIIASVKFLDDYASLSHKAMRKILPHLKDGYAYDEACARAGYNHSSSMTKEENEARVLKDRLEVLPKGALRNPVVEKILNQMVNVVNTLADEYGKPDEIHIEMARELKQNTKQREKATKDISENTKRDEEIVKKLQEEFGLKYVSKKDILRYRLYEELKPLGYKTLYSGQYIPKDRLFSNSIDIEHIIPQALMFDDSYSNKTLEFSDVNRDKGKETAFDYVSRKYGPAELDAYKLRVHELYSHEVISARKRDRLLMKQSDIPSDFVNRDLTNSQYIARKSTEMLGEFVRDVMPTTGSITALLREQWQLVDVMKELNLPKYRQAGKTFTVTKSDGQSLEKISDDWTKRNDHRHHAMDALTIAFTRRSHIKVLNTLNALPGSEDYSLKEMVTTVLPNRKRIFTPPMPLGELRSAFKEALESTLVSIKAKNKVATRNVNKSKIKDGTIAVETLTPRGQLHKEQVYGRRRVYETFEVTVGGKMDAAMIASVASRAEREALKRRLEAFGGDPKKAFTGKNSLEKNPLYVDELQSVAVPAKVKCVRMKEVYSIRKEIGPDISVDKVVDGRVRALLKARLDEYDGDPKKAFVNLEEKPIWVDESKGIKMKKVTVAENFDLCAIRDKRDKDGKLILDSAGNTIPSDYVNPRNNHHIAIYEDADGNYQEQVVTLLEALQRKTAGMPVIDKAYHEDLGWKFVFSMKLNEMFVFPDPATGFDPSEMDLMDPANYASISPNLFRVQKLSSKYYVFRHHLETALEDTPELRDITWRRIQNYNALKGIVKVRINHIGRIVAVGEY

SEQ ID NO: 30 - protein, 1371 aa, Unknown
  OMNI nuclease sequence
MKKVLGLDLGTTSIGWALVNQAESSGEHSSIIATGVRVNPLTTDEKDSFEKGKAITTNADRRQKRGMRRNLQRYKLRREHLLSVLRREGWISEDTVLSEQGARSTYQTFRLRAAAPAEEISLEDLSRVLLMINRKRGYKSNRKTDKGEEGHLIDGMEVARTLYDEGLTPGEYSLRLVNEGKRVLPDYYRSDLVAELEKIWSSQKVWYPDILTDEFKNSIENDGRNGVIKKFLSRYSIYTADNKGKDKKKTALEWRVKALADQLDKETLAYVIADLKGAIQGSSGYLGAISDRSKELVFDNLTVGQYLWRQIEQDPNYSTRNKVFYRQDYMDEFERIWVCQKRFHPELNDELKSEIRDVVIFYQRRLKSQKNLISFCEFETRDITVEEAGVQKVKKCGCRVAPRSSLIFQEFKIWSVLNNISVKSKTDGSTVEVTDEMKRRLFDYLSVNDKITVSDMLRLFELKPKGYDVNYKEIQGNLTLAELYRKFFEVVSASGNGEHDLAKLSYSGAYKILFEVYSALGFSTEILTFDASLPKKEYECQPLFKLWHLLYSYEGDNSKTGDASLIRRVAEICRMPEEYARIIASVKLLDDYASLSHKAMKKILPHLKDGCAYDEACARAGYNHSSSMTKEENEARVLKDRLEVLPKGALRNPVVEKILNQMVNVVNTLADEYGKPDEIHIEMARELKQNAKQREKATKDIADNTKRDEEIVKKLQEEFGLKYVSKKDILRYRLYEELKSLGYKTLYSGQYIPKDRLFSNSIDIEHIIPQALMFDDSYSNKTLEFSDVNRDKGKETAFDYVSRKYGPAELDAYKLRVHELYSHEVISARKRDRLLMRQSDIPSDFVNRDLTNSQYIARKSTEMLGEFVRDVMPTTGSITALLREQWQLVDVMKELNLPKYRQAGKTFTVTKSDGQSLEKISDDWTKRNDHRHHAMDALTIAFTRRSHIKVLNTLNALPGSEDYSLKEMVTTVLPNRKRIFTPPMPLGELRSAFKSALESTLVSIKAKNKVATRNVNKSKVKNGTIAVETLTPRGQLHKEQVYGRRKVYEPFEVTVGGKMDAAMIASVASRAEREALKRRLEAFGGDPKKAFTGKNSLEKNPLYVDELQSVAVPAKVKCVRMKEVYSIRKEIGPDISVDKVVDGRVRALLKARLDEYGGDPKKAFVNLEEKPIWMDESKGIKMKKVTIAENFDLCAIRDKRDKDGKLILDSAGNTIPSDYVNPRNNHHIAIYEDADGNYQELVVTLLEALQRKTAGLPVIDKTYHEDLGWKFVFSMKLNEMFVFPNPATGFDPSEMDLMDPANYAAISPNLFRVQTLSSGDYRFRHHLETSIESDKELKDVTWKRLKSLSSLKGIVKVRINHIGQIVAVGEY

SEQ ID NO: 31 - protein, 1221 aa, Unknown
  OMNI nuclease sequence
MEKILGLDLGVSSIGWAVITQDSENEENNTILDCGVRIVPLNSDEISEFQKGGNVPTNVKRRQSRGMRRNLQRYRWRRHRLYQVLRRLGMMPDRDLMNRFCPQGLYALRERALREPLSLQEIGRIFIHLNNWRGYRSNRKEQVDKDGKKPSEYLKQIAENESMLNGQTIGQYFAARLREDETYRVRQQIFNRETYMREFDLIWATQAQYHPQVLTEANRHLIRDKIIYRQRPLKSAKKTVGECALEWYYALDKETHKPIVLPNGQYRIVRPKCAPNTSPLAQVCKVWESIHNLRINDALGQPRKLSLEEKKKIFYTLQNMDKNLKERDLLTKVLKLSPKLYTVDRLVKEKGLEYNRTKAVLASAFKKMGIQRDDLLQFEPEIEEVDWVNPETGEVGRRLQVRGDFDQQPLYRLWHLIYATEDEHTLIRLLQERYGFTEAQAAELAKIDFNSAGYARKSHRAMRRLLPHYEEGLDYAAACQAAGYRHAQYLTTAENEARQLLDKLEVIPKNSLRNPVVEKILNQMIHLVNDLIETYGRPDAIRVELARELKQSAQEREATSKQMRSRERENAKIREEIAELLNMPAESITRAMVEKYRLYQETDGISLYSGKKIPLAVFLRGEGVDVEHIIPKVSRFDDSFSNKTFCETALNQLKSNLTAYDFMKAQPVPGLQSFEAYTRMVKDLYDSKKISRTKYNNLMMTGEQLLEDTGFLQRQLRETQYIARKALEILRQVCRKVNSTTGSVTDFLRHQWGWDNVIHDLRLPQFKQAELTEISFKNNGTQPIEVIKGWNKRMDHRHHALDALVAACTSQSHIQRINNLNQILAGKEGSERREELLRIGRAKFIAGKRPFSYAQVAEAISNILVSHKQSHRVATRSRNRPKGSDKVQITLTPRGSLHEETVYGRIKQYKKVLLNTSFSLDNLAQMAHPHQRELVEARLAQYDNDPKKAFENLDQNPILYGPDGIKRLTHVTLWEYTLVARKSIAPDLSEKSVEKIADNKVRQLVQARLESGGGKSKEAFKNVGNEPIILGKYPVKRVRVKNPAEKVIALPRGFVEPGSNHHIAIYRDASGELCEHVVTFWEAFQRVRLGLPAIITDIAAALDHISQLPGELPPLQLPENPEWQLVVSLARNDMFVFGLDPSEIDLTNPKNRKTVSKHLFKVRKITKGGYWFLHHLETTPLEDVISKKVGRCKQCSSSSLTGAVKVKVNRLGHIVGIGPSI

SEQ ID NO: 32 - protein, 1502 aa, Unknown
  OMNI nuclease sequence
MRKKIIGLDLGTNSIGWAYIERNSELGDGNIVDAGSRIIPMPQDAISKYETGNLQSSASVRTGYRSMRRLYERSELRRSRLLRVLNILGFLPQHYRDAIDFKVHLGQFKNHGEPLLPYKKDTNGKNTFIFTESFHEMLEDMRTYHPELLSNGRKIPYDWTIYYLRKKALSQPISKEELAWVILNFNTKRGYYQLRGKEEEIATNEHQFYDVLEIDSVEETGLNLKKKGYKWFKVHFTNGKVQNRTWKEAPCRVGDKVECIITYLVKKDGTPKMDENGEQLYKITAPDPTDWTLRKKRTESIITKGHVTVGEYIYDHLLVEPDDKIRGKYVHTIERKFYKEELRTILEKQKEFIPELRDKKLLLACISELYHNNYAHCSVLEKQDFTRLFVDDIIFYQRPLKSKKSLIADCPLEYYPFKDKDGIWKHRPIKCTPRSNPLFQTFRLWQFIQNLRIYRREEEHEGRLLLDVDVTGQFLSTPEDYCDLFDWLRAKSDITQKQLLAYPPFCLGKKAKDYRWNYVDDDKHAYPLCSTHHDISKAIKEVDDTLSLSAKEEKSLWHILYSVDDRYDLEKALRHFASKNGIDEENFVNAFINFKPFDKSYASYSEKAIKKMLPLMSTGRYWNAEGIDAHTMQRISHIVNGEVDKSISNSVREKCAGLDRIEKYQFLPVWKVCYIIYNRHSEATDTIRWTTPDDIDTYLKKELRQGTLRNPVVESVLSEALRVVRDAWRQYGRPDEIHIEMGRDLKQNKAQRQKANTIMLNNQQTNLRIRCMLQEFADPDFHIANVRPQSPSQQELLKIYEQGVFDSIGEIPDDIQTIIDHIGNKNHGISKSDMLRYKLWLEQKYQSPYTGCPISLSRLFTSEYEIEHVIPQSRYFDDSLSNKVICETEVNRVKGTMLAHEFIKSKGGSIVKGTGGKQYKILDAAQYEDFVKSHYVTNKSKMRHLMLDDIPDSFINKQINDTRYMARKALDIFSHLVREETNDDAAISKNVIACSGAITDRLKKDWGLNDVWNDIVSSRFQRMNDITHSSDYGQWVNKGGKRYFQINIPLEISKGFSKKRIDHRHHAMDAIIIACTTHSIVNYLNNASAAELGARHDLRSAVCFKDNNVDGSGSYRWTVKKPWQSFTQDTHSCLEHIVVSFKQNKRLITKVSNRYWHYRDGKKILDRQVKGDLLAIRKSLHKATVSGALYMPEMKRVSLKVALQDINSICDAKARKEIHHIINDLYNGHADNATLLKYFKARKFLVNGIDFSKLNVRVLPTQPNYSASRVALDSTFTEKDIEKVTDTGIQAILRRHLAHYVNERGEYDSTAAFSAEGIAVMNEHISELNNGKPHKPILKVRKKETIGQKFNVGTVGSKNKKFVEADKGTNLFYAVYANADGIRSYESIPMNIAIERLKHKMDVSPSTNDNGDKLLFVLSPGDLVYLPQEGEHVALPLDNSRIYKMVSCSKTQCCFVPYYVANVICDKVEYGPHNKVERSLDGIMVKTRCVKLKVDRLGHISV

SEQ ID NO: 33 - protein, 1479 aa, Unknown
  OMNI nuclease sequence
MNAKHYILGLDMGTNSIGWAAIDAETQQIIATGSRIIPMDERSITDFDKGVLQSSAAQRTLYHRMRITNERAKQRRERLLRVLNILGFLPEHFRQQIDFEKHFGQFKNHSEPLIAYCPDATGKKEFLFRQSFEEMLNEFRQVHPELVAEGKKIPYDWILYYLRKKALTQPVSREELAWILLSFNAKRGYYQLRGMSDELQTADDQKQFCVLTVMQVNQGKEVKAGSQTYEYHIVYDNGKEETKKGKQAPYPIGHQFEAICTTKTNKDGTTTFSTSTPDPEDWTLVKKKTEHDIKLSGKTVGAYIYDEILAQPSVKVRGKLIHTIDRSFYRNEMEQILRAQTAFHKELRDDVLLRRCANELYRRPERQPRIEQLVKQGFLHLLVDDVLFYQRPLKSKKSEIADCPFEQYHYVNRSTGECVDEPVKCIPKSHPLFQEYRLWQFIHNLRIYQKEAEVNGRMVLNYDVTDHFLPNHEVRCQLFDYLNERADVKESVLLKFKPFGLSKKADLERYRWNYPSENTYPCNKTLYTIPKDYRRYFNQKLWHILYSVSDPEQIVKALRSFATEHQIPDTDAFVASLTSVVFSEKDYGSFSEKALKKLLPLMRCGSRWQSSAIDEATQERIQHFLHEPSHEDFSDSVRKALANCHCIEDFQGLPVYQACYAVYGRHSEAADLTAWKSPDELAYFLRYTFKQHSLRNPVVERIVLETLRIVEDLWRKYGKMDEIHVEMGRNLKQNAEGRKRDYDRNQENQAANYRARRLLQEFARYETDIENLRPHSPYQQDLFRLYEEEVLGNYADEVKKDKQIAKTIQSLGRPLEACKVTASEVHRYRLWLDQKCKSPYTGQPISLARLFTRDYEIEHVIPKTRYYNDSMNNKVICEAEVNKDKGNMTGYEYILQRGGSIVQGAFGKTFTILKREEYEDYINLHFKHNRAKKANLLMEDVPAEFSERMLNDTRYMSRVVLSLLSKVVRDDDEVSSVSKHVLPTNGSITTRLKSDWGINDVWNDLIAPRFQRMNERMHTDAFGEMRNESGKRFFQPRLPLDIPQIDKKRIDHRHHAMDAIVIACTTRNHITYLNSVSSHDGDNATRIDLRTKLCLKHHTDANGNYQWLFKKPWDSFTQDVRAALSNIVVSFKQNLRILTSSKKGGSSIRKPLHKETFSGKVLLQQVKTISLKDALADWHQIKDKTLRQEIKRLLAEVYPAGNVSQLIKHFKLQKNLFNGKDIRKVEVYTYSQGEETQVANRKLLDKTLTLKQIESITDSGIRKILMRHLANYQDAAGKYRTEEAFSPEGLAEMNAHIRELNDGKPHQPVYKARFSEIQGQKFAVGQSGAKAKQFVEAAKGTNLFFAIYANKDGKRSYETIPLQDVIARRKRKEEVAPSVNEHGERLLFTLSPGDLVYLPIEEGVVPQVLDKKRIYKVVSFSKRQCFFVPQSFSTTLYDKCEWGSMNKMELTDNKENIKALCVKLKVNRLGEIIEIIDGQ

SEQ ID NO: 34 - protein, 1442 aa, Unknown
  OMNI nuclease sequence
MKTILGLDLGPGSIGWALVNVENGKPKSIIKAGSRIIPMDAGEMSDYESGKLQSSASVRTAFRGMRRLYERAALRRERLLRVLNVLGFLPQHYRDQIDFGEHPGKFKNHGEPLLPYRKNEAGKSEFIFQPSFLEMLEDFKKNNPQVLDDGRLIPRDWTLYYCRKKALDREISREELAWILLNANSKRGYYQLDEEKTEKSNAEKEYRRAKVLDVERLEEDRKQKGFYFYKITYDGGLTQTRKCKMQPWRVGDEVDLIITTPLDKNGKPKKDEDGGIRQTLSSPKEDDWGLVMQKTQAGIDHSNCTVGEYIYNSLLENPSEKVRGGIVKTIERHYYMEELRKILESQARFIPELCDHELYMKCVRELYRNNEAHVNELKRGNIVDFLIKDVIYYQRPLKSKKSCIADCPYESYTYVDKETGEIKKRPLKVMPKSHPLFQEFRLWQFIRNIRITENEKIVDGRKYFGYDVTAKYLGTPEDVCRLYEKLSGYENIAESIVLKSLGLNAKMFKWNYGSKKEFPGLKTHHEFATRIAKLEKARELTQKEEYKLWHILYSVSDRDELEKALKHFAEECGFDGQSFYEKFKTVPNMRGDYASYSERAVKRLLQLMRSGKYWNEKEIDEATLKRINAIIEYGYSPYEEFSEFKRVDDFQYLQLSDACYVVYGRHSENADNSVWNSPEEIDEYIGGEFRKNSMRNPVVEKVVAETLKVVRDIWKTYGKPAEIHVEMARSLKDPNDKRKEATERMAANRKETIDVREKLQELKDEHKADNINPNSFIHILKYKLWKEQGGQSPYTGKSISIARLFTDEYQVDHIIPQKRYYDDSFTNKEVCESAVNLDKGARLAYEYILAEGGKEINVTINGKHEKIAILPKEQYEEWVKKHCVRENGIGRKGKNLMMTDVPASFNASQLNNTRYIARKTAEILSHIVREGSDPGARSKNIIMTNGSITDRLKKDWGLKQIWNELMQPRFERLNDKTQSNDYGEDVVDAHGRHYFQTKVPEGLAEKFDIKRIDHRHHAMDAIVIACTSLNHINYMNNLSGGEKERYDLRRVLCEKDSRAFLKPWETFTQDSREAMNNIVVSFKQNLRIVSRASNYYSHYVDGKKIIERQTKGEHFSIRKPLHKATYSGLVRLPYTKMEKIENTIDNPEQIVDKSIRKGLKEILVQYNGAADKKKIKKYFKDRDYKLNGVDVAKVEVRIVPEQAGHSAHRTVLGSITNRKQLDSITDSGIKKILLNHLENYGGNYEEAFSPEGISSLNDNIRQLNGGRDHKPVKCVRVSEKFSLKFPVGQSGSKIKTYVETEKGTNLFFAIYVDEEGTRVFETIPLNVVVERKKDHLPAVPECNEKGDKLLFSLSPGDLVYVPEEGEHIAMPLDPKCIYKMVSANSGVCYFVPQNVATPIADKIEFGIKNKSERDLNGNQIKKVCLKLETDRLGNIIKITGND

SEQ ID NO: 35 - protein, 1442 aa, Unknown
  OMNI nuclease sequence
MKTILGLDLGPGSIGWALVNVENGKPKSIIKAGSRIIPMDAGEMSDYESGKLQSSASVRTAFRGMRRLYERAALRRERLLRVLNVLGFLPQHYRDQIDFGEHPGKFKNHGEPLLPYRKNEAGKSEFIFQPSFLEMLEDFKKNNPQVLDDGRLIPRDWTLYYCRKKALDREISREELAWILLNANSKRGYYQLDEEKTEKSNAEKEYRRAKVLDVERLEEDRKQKGFYFYKITYDGGLTQTRKCKMQPWRVGDEVDLIITTPLDKNGKPKKDEDGGIRQTLSSPKEDDWGLVMQKTQAGIDHSNCTVGEYIYNSLLENPSEKVRGGIVKTIERHYYMEELRKILESQARFIPELCDHELYMKCVRELYRNNEAHVNELKRGNIVDFLIKDVIYYQRPLKSKKSCIADCPYESYTYVDKETGEIKKRPLKVMPKSHPLFQEFRLWQFIRNIRITENEKIVDGRKYFGYDVTAKYLGTPEDVCRLYEKLSGYENIAESIVLKSLGLNAKMFKWNYGSKKEFPGLKTHHEFATRIAKLEKARELTQKEEYKLWHILYSVSDRDELEKALKHFAEECGFDGQSFYEKFKTVPNMRGDYASYSERAVKRLLQLMRSGKYWNEKEIDEATLKRINAIIEYGYSPYEEFSEFKRVDDFQYLQLSDACYVVYGRHSENADNSVWNSPEEIDEYIGGEFRKNSMRNPVVEKVVAETLKVVRDIWKTYGKPAEIHVEMARSLKDPNDKRKEATERMAANRKETIDVREKLQELKDEHKADNINPNSFIHILKYKLWKEQGGQSPYTGKSISIARLFTDEYQVDHIIPQKRYYDDSFTNKEVCESAVNLDKGARLAYEYILAEGGKEINVTINGKHEKIAILPKEQYEEWVKKHCVRENGIGRKGKNLMMTDVPASFNASQLNNTRYIARKTAEILSHIVREGSDPGARSKNIIMTNGSITDRLKKDWGLKQIWNELMQPRFERLNDKTQSNDYGEDVVDAHGRHYFQTKVPEGLAEKFDIKRIDHRHHAMDAIVIACTSLNHINYMNNLSGGEKERYDLRRVLCEKDSRAFLKPWETFTQDSREAMNNIVVSFKQNLRIVSRASNYYSHYVDGKKIIERQTKGEHFSIRKPLHKATYSGLVRLPYTKMEKIENTIDNPEQIVDKSIRKGLKEILVQYNGAADKKKIKKYFKDRDYKLNGVDVAKVEVRIVPEQAGHSAHRTVLGSITNRKQLDSITDSGIKKILLNHLENYGGNYEEAFSPEGISSLNDNIRQLNGGRDHKPIKCVRVSETFTTKFPVGQTASKTKSYVETEKGTNLFFAIYVDEERKRTFETIPLNVVVERKKQHLLAVPEHNENGDKLLFSLSPGDLVYVPEEGEHIAMPLAPKRIYKMVSSGKGQCFFIPQNIAAPIINNTELGSNNKSENSWDNRQIKSVCLKLETDRLGNIIKITGND

SEQ ID NO: 36 - protein, 1442 aa, Unknown
  OMNI nuclease sequence
MKTVLGLDLGPGSIGWALVNTENGMPESIIKAGSRIIPMDAGEMSDYESGKLQSSASVRTAFRGMRRLYERAALRRERLLRVLNVLGFLPQHYRDQIDFDLHPGKFKDHGEPLLPYRKNEAGKSEFIFQPSFLEMLEDFRRNNPQVLEGGRLIPRDWTLYYCRKKALDREISREELAWILLNANSKRGYYQLDEENAEKSNAEKEYRRAKVVGVERLEEDRKQKGFYFYKITYEGGLTQTRKCKMQPWRVGDEVDLIITTPLDKNGKPKKDENGEIKKTIRSPKEDDWGLVMQKTQAGIDHGNGTVGEYIYNSLLENPSEKVKGGIVKTIERHYYKDELRKILEAQSRFIPELQDHGLYIKCVKELYHNNESHANELRHRNIIDFLINDVIYYQRPLKSKKSCVADCPYESYTYVDKETGEIKKRPLKVMPKSHPLFQEFRLWQFIRNLRVTENEKIVDERRFFGYDVTAKYIGTPEDVCRLYEKLSGYADISESKVLKALGLNAKMFKWNYGSKKEFPGLKTHHEFASRIAKLENARELTQKEEYKLWHILYSVSDRDELEKALKHFAEECEFNPQNFYEQFKAAPKMRGDYASYSERAVRRLLPLMRTGKYWDEKEIDAATLKRINAIIADGYNPCEDFPEFKRVGDFQNLQLSDACYVVYGRHSENADNSVWTSPEEIDEYLCGEFRKNSMRNPVVEKVVAETLKVVRDIWKTYGKPAEIHVEMARSLKDPNDKRKEATERMAANRKDTIGVREKLQELKDGHKADNVNPNSSIHILKYKLWEEQGGLSPYTGKRISIARLFTDEYQIDHIIPQKRYYDDSFTNKVVCESTVNLDKGARLAYEYILAEGGKEISVTVNGKHERTIIFPKEQYEEWVKKNYMKEGVVGRKGKNLMMTDVPASFNASQLNNTRYIARKTAEILSRIVRGENDQGARSKNIIMTNGSITDRLKKDWGLKQIWSKLMQPRFERLNDKTQSNDYGEEVTDSNGRRYFQTRVPEELAEKFDIKRIDHRHHAMDAIVIACTSLSHINYMNNLSGGEKERHDLRRVLCEKDSRAFLKPWETFTQDSREALNNIIVSFKQNLRIVSRASNYYRHYVDGKKVTERQTKGEHFSNRKPLHKLTYSGLVRLPYTKMEKIENTIDNPEQIVDKSIRKGLKEVLAQYNGSADKKKIKKYFKDRDYKLNGVYVAKVEVRIVPEQARHSARRTALGLIKNRKQLDSITDTGIKKILLNHLENYGGNYEEAFSPEGISSLNDNIRQLNGGRDHKPVKCVRVSEKFSLKFSVGQNCSKIKTYVEAADNTNLFFAIYVDEEGKRAFETIPLNVVVERKRQHLSAVPEHNDKENKLLFSLSPGDLVYVPEEGEHIAMPLDYERIYKMQSTDSNKCFFVPQYVAARIADKIEYGPKNKSERDLNGNQIKKVCLKLETDRLGNIIKITGND

SEQ ID NO: 37 - protein, 1442 aa, Unknown
  OMNI nuclease sequence
MKTILGLDLGPGSIGWALVNTENGKPESIIKAGSRIIPMDAGEMSDYESGKLQSSASVRTAFRGMRRLYERAALRRERLLRVLNVLGFLPQHYRDQIDFDEHTGKFKNHGEPLLPYRKNETGKSEFIFQQSFLEMLEDFMKNNPQVLEGGRLIPRDWTLYYCRKKALDREISRGELAWILLNANSKRGYYQLDEEKTEKSNAEKEYRRAKVVSVEKQDEDRKQKGYFFYKITYEGGLTQTRKCKMQPWRVGDYVDLVITTPLDNNGKPKKDEDGEIRKTLSSPKEDDWGLVMQKTQAGIDHGNGTVGEYIYNSLLENPSEKVKGGIVKTIERHYYKDELRKILEAQSRFIPELQDHGLYIKCVKELYHNNESHANELRHRNIIDFLINDVIYYQRPLKSKKSCVADCPYESYTYVDKETGEIKKRPLKVMPKSHPLFQEFRLWQFIRNLRVTENEKIVDERRFFGYDVTAKYIGTPEDVCRLYEKLSGYADISESKVLKALGLNAKMFKWNYGSKKEFPGLKTHHEFASRIAKLENARELTQKEEYKLWHILYSVSDRDELEKALKHFAEECEFNPQNFYEQFKAAPKMRGDYASYSERAVRRLLPLMRTGKYWDEKEIDAATLKRINAIIADGYNPCEDFPEFKRVGDFQNLQLSDACYVVYGRHSENADNSVWTSPEEIDEYLCGEFRKNSMRNPVVEKVVAETLKVVRDVWKTYGKPAEIHVEMARSLKDPNDKRKEATERMAENRRDTIDVREKLQELKDGHKADNVNPNSSIHILKYKLWKEQGGQSPYTGKSISIARLFTDEYQVDHIIPQKRYYDDSFTNKVVCESAVNLDKGARLAYGYILAEGGKEIDVTVNGKREKTAIFPKEQYEEWVKKHCVRENGIGRKGKNLMMTDVPASFNASQLNNTRYIARKTAEILSHIVREGSDPGARSKNIIMTNGSITDRLKKDWGLKQIWSELMQPRFERLNDKTQSNDYGEEITDSNGKRYFQTRVPEVLAEKFDIKRIDHRHHAMDAIVIACTSLSHINYMNNLSGGEKERYDLRRVLCEKDSRAFLKPWETFTQDSREALNSIIVSFRQNLRIVSRASNYYNHYVDGKKVTERQTKGEHFSIRKPLHKATYSGLVRLPETKMEKIENTIDNPEQIVDKSIRKGLKEVLAQYNGTADKKKIKKYFKDRDYKLNGVDVSKVKIRFVPEQARHSAHRTALGSITNKKQLDSITDSGIRKILLNHLENYGGNYEEAFSPEGISSLNDNIRQLNGGRDHKPVKCVRVSEKFSLKFSVGQNCSKIKTYVEAADNTNLFFAIYVDEEGKRAFETIPLNVVVERKRQHLSAVPEHNDKENKLLFSLSPGDLVYVPEEGEHIAMPLDYERIYKMQSTDSNKCFFVPQYVAARIADKIEYGPKNKSERDLNGNQIKKVCLKLEIDRLGNIIKITGND

SEQ ID NO: 38 - protein, 1247 aa, Unknown
  OMNI nuclease sequence
MKVLGLDLGVGSVGWCLIEVDGKYNPIEILGMGSRILSLTPDESSNFDRGNGESVCAQRTFRRTARKMLCRYKMRRRLLRSQLAFLGMLDSADSLNSLSPLELWKLRSDAATSGVRLTLPEIGRVLLHLNQKRGYKHAKTDVADAKQTEFVQDVNRNYAEIRAEGKTYGQHFYERLLATAATTDKGAKVATFRIRENVFPRQAYEDEFDTIMRVQRKFYPEILTDEVIAGLRNAIFFQRPLKSCKHLVSVCEFEGKNYCTADGREVFGGPKVAPRTSPLAQVCRLYEVINNIRLVNVRNKDAAPIPDGIVSSEARKSQYQFVFTAEERERIYEFLNTHEKMTVTDLLKLIGLKRGDGFRPDQSLGKGIPGNKTYTALFNALEGVGRRDELLRFNLRFIDGNADSATGDVRRVVSPDFINEPLYRLWHTAYSIADRDELAAALAKNFGITDPAVVDRIFAIDFTGAGFSNRSARFMRRIIPYLAEGMVYSDAAAAAGVNHSASVTAEENATRVVVDHLDIIKKGSLRQPVIEKILNQMIHVVNSLIAQFGPIDEVRVELARSLKQSAKERSDASTAINAREKENKALGEKIAEYGLTPSRRTIQKLRLWEETEHVCMYCGQPVSATEFLTGDAEVEHIIPRSIFFDDSLSNKTCACRRCNKAKNNRTAYDFMKEDHTDEEFRAYIARVEAMAEAKKISRTKRDRLLCPKEEIPSDFLERDLRQSQYIARKAMEILHTVVRNVWATSGSVTDFFRHQWGYDRILHDLSLDKYASAGLVEEVEYEHKGQTHRRQQIKNWSKRFDHRHHAVDALVIALTRQGYVQRLNNLNAEHGNIHAELVKENADFTRNKSQLELWASTRPRFDIETVRKAVEGIAVSFKSGKKLTTPGKRAIMRGGKKTVVQDKLVIPRGALHQETVYGLIRLPDGRKTLKYAFDTPTLVSDPAARKAIQAILEHFGGNVKKALKSLPGEGLEVMRKGKRENVTEVSCHRFEYVVRKSVAALKYKDILKIVDGAVRRSVEGRFAECGNKDSEYQKSFAERPLILPGAFTPIRTVRIATGLKPKSMAAVRRDSSGNPIGYAKTASNHHIAIYEDSVGRKLCSVTSMWDGVLRRLNGIPVIVKHPDDAWNLLMGIADEDVRERLAASLPRPDWKFLMSLQMNQMFVLGLSEDEFNDAVRNNDRATLASHLYRVQKLADNDFSLRRHTNTTADDTTEFRKMLDVYRLSTQAFLNLKPHKVKITPTGDFAYD

SEQ ID NO: 39 - protein, 1247 aa, Unknown
  OMNI nuclease sequence
MKVLGLDLGVGSVGWCLIEVDGKYNPIEILGMGSRILSLTPDESSNFDRGNGESVCAQRTFRRTARKMLCRYKMRRRLLRSQLAFLGMLDSADSLNSLSPLELWKLRSDAATSGVRLTLPEIGRVLLHLNQKRGYKHAKTDVADAKQTEFVQGVNRNYAEIRAEGKTYGQHFYERLLATAATTDKGAKVATFRIRENVFPRQAYEDEFDTIMRVQRKFYPEILTDEVIAGLRNAIFFQRPLKSCKHLVSVCEFEGKNYRTADGREVFGGPKVAPRTSPLAQVCRLYEVINNIRLVNVRNKDAAPIPDGIVSSEARKSQYQFVFTAEERERIYEFLNTHEKMTVTDLLKLIGLKRGDGFRPDQSLGKGIPGNKTYTALFNALEGVRRRDELLRFNLRFIDGNADSATGDMRRVVSPDFINEPLYRLWHTAYSIADRDELAAALAKNFGITDPAVVDRIFAIDFTGAGFSNRSARFMRRIIPYLAEGMVYSDAAAAAGVNHSASVTAEENSTRVLVDHLDIIKKGSLRQPVIEKILNQMIHVVNSLIAQFGPIDEVRVELARSLKQSAKERSDASTAINTREKENKALGEKIAEYGLTPSRRTIQKLRLWEETEHVCMYCGQPVSATEFLTGDAEVEHIIPRSIFFDDSLSNKTCACRRCNKAKNNRTAYDFMKEDHTDEEFRAYIARVEAMAEAMKISRTKRDRLLCPKEEIPSDFLERDLRQSQYIARKAMEILHTVVRNVWATSGSVTDFFRHQWGYDRILHDLSLDKYALAGLVEEVEYEHKGQTHRRQQIKNWSKRFDHRHHAVDALVIALTRQGYVQRLNNLNAEHGNIHAELVKENADFTRNKSQLELWASTRPRFDIETVRKAVEGIAVSFKSAKKLTTPGKRAIMRGGKKTVVQDKLVIPRGALHQETVYGLIRLPDGRKTLKYAFDTPTLVSDPAARKAIQAILEHFGGNVKKALKSLPGEGLEVMRKGKRENVTEVSCHRFEYVVRKNVAALKYKDILKIVDGAVRRSVEGRFAECGNKDSEYQKSFAERPLILPGAFTPIRTVRIATGLKPKSMAAVRRDSSGHPIGYAKTASNHHIAIYEDSVGRKLCSVTSMWDGVLRRLNGIPVIVKHPDDAWNLLMDIADEDVRERLAASLPRPDWKFLMSLQMNQMFVLGLSEDEFNDAVRNNDRATLAAHLYRVQKLADNDFFLRRHTNTTADDTTEFRKMLDVYRLSTQAFLNLNPHKVKITPTGDFAYD

SEQ ID NO: 40 - protein, 1247 aa, Unknown
  OMNI nuclease sequence
MKVLGLDLGVGSVGWCLIEVDGKYNPIEILGMGSRILSLTPDESSNFDRGNGESVCAQRTFRRTARKMLCRYKMRRCLLRSQLAFLGMLDSADSLNSLSPLELWKLRSDAATSGVGLTLPEIGRVLLHLNQKRGYKHAKTDVADAKQTEFVQGVNRNYAEIHAEGKTYGQHFYERLLATAATTDKGAKVATFRIRENVFPRQAYEDEFDTIMRVQRKFYPEILTDEVIAGLRNAIFFQRPLKSCKHLVSVCEFEGKNYRTADGREVFGGPKVAPRTSPLAQVCRLYEVINNIRLVNVRNKDAAPIPDGIVSSEARKSQYQFVFTAEERERIYEFLNTHEKMTVTDLLKLIGLKRGDGFRPDQSLGKGIPGNKTYTALFNALEGVDRRDELLRFNLRFIDWNADSATGDMRRVVSPDFINEPLYRLWHTAYSIADRDELAAALAKNFGITDPAVVDRIFAIDFTGAGFSNRSARFMRRIIPYLTEGMVYSDAAAAAGVNHSASVTAEENAARVLVDHLDIIKKGSLRQPVIEKILNQMIHVVNSLIAQFGPIDEVRVELARSLKQSAKERSDASTAINAREKENKALGEKIAEYGLMPSRRTIQKLRLWEETEHVCMYCGQPVSATEFLTGDAEVEHIIPRSIFFDDSLSNKTCACRRCNKAKNNRTAYDFMKEDHTDEEFRAYIARVEAMAEAKKISRTKRDRLLCPKEEIPSDFLERDLRQSQYIARKAMEILHTVVRNVWATSGSVTDFFRHQWGYDRILHDLSLDKYALAGLVEEVEYEHKGQTHRRQQIKNWSKRFDHRHHAVDALVIALTRQGYVQRLNNLNAEHGNIHAELVKENADFTRNKSQLELWASTRPRFDIETVRKAVERIAVSFKSGKKLTTPGKRAIMRGGKKTVVQDKLVIPRGALHQETVYGLIRLPDGRKTLKYAFDTPTLVSDPAARKAIQAILEHFGGNVKKALKSLPGEGLEVMRKGKRENVTEVSCHRFEYVVRKNVAALKYKDILKIVDGAVRRSVEGRFAECGNKDSEYQKSLAERPLILPGAFTPIRTVRIATGLKPKSMAAVRRDSSGNPIGYAKTASNHHIAIYEDSVGRKLCSVTSMWDGVLRRLNGIPVIVKHPDDAWNLLMDIADEDVRERLAASLPRPDWKFLMSLQMNQMFVLGLSEDEFNDAVRNNDRATLAAHLYRVQKLADNDFFLRRHTNTTADDTTEFRKMLDVYRLSTQAFLNLNPHKVKITPTGDFAYD

SEQ ID NO: 41 - protein, 1550 aa, Unknown
  OMNI nuclease sequence
MKNILGLDLGSNSIGWAIVKALKNEDGKEILQSIDLAGSRIIPMDQATLGNFENGNSVSQTRERTGYRSARRLRERYLLRRERLLRVLNCMGFLPEHYSQNIDKYGKFFLDNEVKLSWKKDKMGKNEFIFLDSFNEMLEDFRHSQPQLLLDGRKVPYDWTIYYLRKKALTEKISKEELAWILLNFNQKRGYFQLRGEDEEVQGKKIEFYALKVVRVEDTGEKKGKDTWYNVYLESGLGDTDDYWVYRRASSVPIDEWEGQVKEFIVTTTLDNNGSPQGDKEGKVKRSFSIPKPEDWMLVKKKTEVDIKSSGKTVGTYIYDTLLQKPDQKIKGKLIRTIERENYTNELSLILENQKKFHLELQDRELYHQCIELLYCKNEAHKRVIGTWDFTSLFIKDILFYQRPLKSKKALIDNCPYEESFYIENGEKKSKPRKCIAKSHPLFQEFRIWQFISNLRIYQKVKEVDGKLQFNVDVTSDFLRDESAYGELFKWLNERAEVSQEDLLKHLGLKKTKTEDTVSLYRWNYVEDKKYPGNKTRSSILKKLLNDEKEALSEDIELKIWHLLYSVSAQSEIDKALSSKNVSTKGIYSGLSVYFSDETIQKIKNVKLESGYGSYSAKAIGKLLPLMRRGKYWNLESIDNHTKERIEKILNGECDETIRARTREKSISLTDISQFKGLPLWLACYIVYDRHSELKTIKKWNGPEDIDKFLKEFKQHTLRNPIVEQVIMETLRVVRDIWRRVGSIDEIHIEMGRDMKQTAQERARRSAIISRNENDNLRIKALLHEFMNPELGIENVRPYSPAQQEILRIYEDGVLSSVSEIEDEIKNILKKFNESEEGKRPTKNEIIRYKCWLEQKYRSPYTGEIIPLGKLFTPAYQIEHIIPQARFFDDSFTNKVICEAEVNAKKGDLLGYEFVKEKGGEIVELSGGRNVRIFSVEEYEDFVKEHYKSNKQKMQRLLAEDIPTEFSHRQLNDSRYISKYIRNLLSNIVREDDEQESVSKNVISCNGAITDRLKKDWGVNDVWNHIILPRFVRLEEIRADNGEKFTAFNQEGHRIPSMPLIHQKGFNKKRIDHRHHAMDAIVIACTTRDHVNLLNNECSNPQNNVNRHQLSRKLRRYENVSYKQDGKLKEREVPKEFLKPWEGFTRDVEFALKNVIVSFRQNLRVLNKTVNYFQHWKDNSSEKEWKEQKSADHWSIRKPLHQETVLGEVFLWRTRFVSLREALTKPKRIVEKDLRSKILELQRKGYDIERIKKYFEDNKDVWQDVNLSKIEVRYYSREIVDPRTGLPKNRYFATRFGNDLISLFSGVSNFENAKKIIKSITDTGIQKILFRHLENKGNDPVLAFSPEGIDEMNRTIKTLNNGKDHKPIYKVRIYECSTMKFPLGSVGNKSKKFVEAAKGTNLYFAVYEKEVENDRGECHKERAFKTIPLNDVIRNLKQGLSIAPNDENGNPPAFILSPNDLVYLPTKEELETGSISQPLDRNRIYKMVSCTGNVAHFIPAFIAIPILQTIELGSKNKAQKAWTGEMIKESCIPIKVDRLGILISINGRAV

SEQ ID NO: 42 - protein, 1550 aa, Unknown
  OMNI nuclease sequence
MKNILGLDLGSNSIGWAIVKALKNEDGKEILQSIDLAGSRIIPMDQATLGNFENGNSVSQTRERTGYRSARRLRERYLLRRERLLRVLNCMGFLPEHYSQNIDKYGKFFLDNEVKLSWKKDKMGKNEFIFLDSFNEMLEDFRHSQPQLLLDGRKVPYDWTIYYLRKKALTEKISKEELAWILLNFNQKRGYFQLRGEDEEVQGKKIEFYALKVVRVEDTGEKKGKDTWYNVYLESGLGDTDDYWVYRRASSVPIDEWEGQVKEFIVTTTLDNNGSPQIDKEGKVKRSFSIPKPEDWMLVKKKTEVDIKSSGKTVGTYIYDTLLQKPDQKIKGKLIRTIERENYTNELSLILENQKKFHLELQDRELYHQCIELLYCKNEAHKRVIGSWDFTSLFIKDILFYQRPLKSKKALIDNCPYEESFYIENGEKKSKPRKCIAKSHPLFQEFRIWQFIYNLRIYQKVKEVDGKLQFNVDVTSDFLRDESAYVELFKWLNERAEVSQEDLLKHLGLKKTKTEDTVSLYRWNYVEDKKYPGNKTRSSILKKLLNDEKEALSEDIELKIWHLLYSVLAQSEIDKALSSKNVSTKGIYSELSVYFSDETIQKIKNVKLESGYGSYSAKAIGKLLPLMRRGKYWNLESIDNHTKERIEKILNGECDETIRARTREKSISLTDISQFKGLPLWLACYIVYDRHSELKTIKKWNSPEDINKFLKEFKQHSLRNPIVEQVTMETLRVVRDIWRRVGSIDEIHIEMGRDMKQTAQERARCSAIISRNENNNLRIKALLHEFMNPELGIENVRPYSPAQQEILRIYEDGVLSSVSEIEDEIKNILKKFNESEEGKRPTKNEIIRYKCWLEQKYRSPYTGEIIPLGKLFTPAYQIEHIIPQARFFDDSFTNKVICEAEVNAKKGDLLGYEFVKEKGGEIVELSGGRNVRIFSVEEYESFVKEHYKSNKQKMQRLLAEDIPTEFSHRQLNDSRYISKYIRNLLSNIVREDDEQESVSKNVISCNGAITDRLKKDWGVNDVWNHIILPRFVRLEEIRADNGEKFTTFNQEGHRIPSMPLMYQKGFNKKRIDHRHHAMDAIVIACTTRDHVNLLNNECSNPQNNANKHQLSRKLRRYENVSYKQDGKLKEREVPKEFLKPWEEFTRDVEFALKNVIVSFRQNLRVLNKTVNYFQHWKDNSSEKEWKEQKSADHWSIRKPLHKETVSGEVFLWRTRFVSLREALTNPKRIVEKDLRSKILELQRKGYDTKRIKKYFEDNKDVWQDVNLSKIEVRYYSREIVDPQTELPKNRYFATRFGNDLISLFSGVSNFEKAKKIIESITDTGIQQILFRHLENKGNDPVLAFSPEGIDEMNRTIKTLNNGKDHKPIYKVRIYECSTMKFPLGSIGNKSKKFVEAAKGTNLYFAVYEKEVENDRGECHKERTFKTIPLNDVIRNLKQGLSIAPNDENGNLPAFILSPNDLVYLPTKEESETGSISQPLNRNRIYKMVSCTGNEAHFIPAFIATPILQTIELGSNNKAQKAWTGEMIKESCIPIKVDRLGMLISINGKAV

SEQ ID NO: 43 - protein, 1427 aa, Unknown
  OMNI nuclease sequence
MKRVLGLDLGTNSIGWAVVNEAENHTEQSSIVKLGVRVNPLTVDESQNFEKGKSIETNTARTAKRSARRNLQRYKLRRDTLIQILKKHNFICDDAILSENGNKTTFETYRLRAKAVTEAISLQEFARVLLMINKKRGYKSSRKAKGDEEGTLIDGMEVAKMLYDNDMTPGMLCLQLMRNGKKKMPDFYRSDLQSEFDRIWNFQKTFYETSLTPAAREEIIGKNKSQTWAILQKHFVWEKQAISWSESNAQTETVTEKCRLVGLKRQTKGVDLKIENYEWRVRALSERIDPEELAIVLQEINGEINSSSGYLGAISDRSKELFFKNLTVGQALLQKIEKNPHTSLKNIVYYRQDYLDEFETIWEKQAEYHPELTKELKHEIRDAVIFYQRRLKSQKSLISICEFEREDRERTVNGKTKAFVAGCRVIPRSSLLFQEFKIWQTLNNIEVFIADGKKKRHRSSTPEASLFDDIADPLDITGRRLLTLEEMHTLAEELSVRDKMKKNEIIKLLFGNRTDLDLNYKEIDGNRTWHELYKAFSEILENSGHEPINFKHSTSCIKEQVRSVFTALGWNTAILDFDSSAPLDTQVSYQLWHLLYSFEGDNTKTGDGKLISKLCDICRFDKEHARILSNVSFIEDYGSLSAKAIRKILPYLKEGNLYDKACGLAGYRHSASSLTKEEIINKELKPFLDILPKNSLRNPVVEKILNQMVNVVNELIKTYGPFDEIRVELARELKKSQKEREELSSAINSATKELEKVRNILKTEFNIPHPTRNDVIRYRLYEELKDNDYRTLYSNTYIPREKLFTKEFDIEHIIPKARLFDDSFSNKTIEARDVNIKKSNKTAYDFVLSEYGEEGLARYRQHCESLFKDKRTKLRKLLMEEKDIPADFIERDLRNTQYIAKRALSMLNEICRRVVATTGSITDQLRNDWQLVDVMKELNWEKYKALGLVEYHTDHDGRQIGRIKDWTKRNDHRHHAMDALTVAFTKDVFIQYFNNKNASDKANSNEYAIKNTYFESGRAIAPMPLGEFRAEAKKHMENILVSIKAKNKVVTNNVNKSKSGKRGGNSKIQLTPRGQLHNETIYGSHKEYVTKTEKVGASFTEEKIMTVCRQQYREALLWRLNEFNGDPKKAFTGKNSLEKNPIWLNEQKTKFVPPTVKTVEMATVYTIRKAISADLKIDKVTDVGIRHLLQQRLDEYGGDAKKAFENLDENPIWLNKEKGIQIKRVTITGISNALALHDKRDKDGNLILDKNGRRIPIDFVNTGNNHHVAIYRKPVLDKQGQQKYDDEGNAMFELAENVVSFYEAVARVNEGLPVIDKNFNREEGWEFLFTMKQNEYFVFPNEKTGFNPKEIDLMDPANYQIISPNLFRVQKFSNKDYTFRHHLETNVETNKNMQDIAWKRITSFAIMDKIIKVRINHIGQIVKVGEY

SEQ ID NO: 44 - protein, 1259 aa, Unknown
  OMNI nuclease sequence
MKQILGLDLGVGSVGWAVIRQSDNTPEEISIEGLGSRVVPLNSDETTGFTKGNGESKCHERTLKRSMRRNLDRFQQRRKMLGQLLDELGMTFDSDLLRLSPLELWQLRADAADGKPVSAAQLGRVIYHINMRRGYKSSKDEESAEGADKRKQSEYLAKISGRAREAAEANQTPGQYFAVRLKESAYTTPSGATCCSYRIKEQTFPRHAYIEELRRILNAQRQHLPDILTDANIARIVDTIFYQRPLRSCKHLVSLCEFESHEITDSKGNKLIVGPRVAPASSPLAQECRIWEAVNNLSLINHHNRKRKDSPLPSLFDISSDARKLAYEYPIDDNDRRMIVGFLNENEKMKGSDLLKLLRLRKDDGFAVPAQVSRGLKGNVTRNMLRKALGDTPGADDLLRFDIEIVETDQYDEVTGAAKTMVSDSYLREPLYQLWHTCYSVSDFDEFDKAIRKKFGITDSEVINRLFHLDFRGMGYASKSAKMMTRIIPWLQSGYKYSEACELAGYKHSSYVTADENATRPLLQQLPPIQNGDLRQPVVEKILNQMVNVVNAAIDKYGPMDEIHVEMARELRRGKDQRKADYEHNSRREKDNDRIMKVLVEKGLKGSRTQIQKYRMLEESDFCCMYCGKPINDMEFLRGIEADREHVIPRSLFFDDSFSNKVCACRQCNAAKGQMTAYDFMAAQGDDTLTTFINRVNMLLDRYKKSGGREGISKTKHTRLLTALKDIPKDFIDRDLRLTQYITRKALDMLHAVSRNVMATSGSVTDFFRHAWGYDEILHSLNFARYDLAGQTDQTEVIHKGQTHLETRIAGWNKRLDHRHHAIDALTIALTRQAYVHRLNSLNASGGDSADGQSDSDQLTGNLNKWATSRPHPSVAAASDAVADIAISFKAGKKVTVPGKRYTYKGSKRTLAQDGLLVPRGALTKESTYGVRKMPIGLQPLKYLFNNPSEIDDIRILRAVEARLADNANDASKALKSCKRRPLTVEGSDVPVTEALCLKPTVVIRVKLTSVTPKNCSDIVDGAVREAVATRYEEVGGSADKFVKSLAERPLYRDAGGRLPITSVRIRKGLSPESITPVRYDSHGNAIGYAEFGNNHHIALYEKPDGTIEECVVPFAEAVRSRQANLPVVVTDPQALWQQIDMLDKELPESSLSRFPSHDSRFLMSMQVNEMFILGLSDEEFSDLVRDENRHELTSHLYRVQKLSSLYYDFKLHTSTLSDCTTDQMNCGNYIRIVSFSALKKYNPIKVRVDILGNIILPS

SEQ ID NO: 45 - protein, 1248 aa, Unknown
  OMNI nuclease sequence
MKNILGLDLGTTSIGWALIKTDDKNNPHEILRMGVRRVPLAENEDNKFVKGQSITTNADRTTARGIRRNNDRYKLRRQALSKELSLLGMAPSDALMKLHLLELWQLRAKAVTDEVSLTELGRILYLLNKKRGYKHSSIDEDKSKRDFVKKVNGRYAELHQTNMTIGQYVAWKISETAITKEGKTYYVYRVKDRVFPRRAYEEEFDAIMQCQQMYHPDVLTNEVIDRIRNNIIFYQRDLRSCKHLVSVCDFEKRHFYDKDGKLKRNKKDEIIYDGPKVAPRTSPLFQMYKIWQSANNIRFHNRNKEYLDITREQRREIALYMDNNEIIKLEDVKRILELNDDSRWYCDNAIKNGIKGNTTKHAIVTALSSLSQDKIAEITRFNLEMEPTEMVDAETGEVLVRIKKTYQREPLYRLWHIVYSIKKDEERKSAVAKFLQSFGIDNKEMVQRLSDIDFRTPGYGNISAKAICKILPYMTEGIEYSEACEYVGINHSNSLSKEDNEKRELMSEIPILKKNSLRQPTVEKILNQTINVFNGINAELRKKGERIDEVRVELARELKQSKEERHKTSEEMKALDDKNNEYKKILEKEYHLNATRKNLLRYRLWIESNMSCFYCGQPIGFTPFANEPEEEREHILPKSLHYDDSFANQVCSCRKCNSEKGGRTALDYMRTTSHLQDYLDRVNQLHQAHKISGKKYTHLLTSYDDYMERKKNGKETKEDIQIWENPIDRQLRLSQYISRKAMEILSYACRDVVATSGTVTAIIRHAWGYDTLLEELNMPIYRDANLTEFVEIESKGQKLEKEVVKNWTKRLDNRHHAIDALVVACTSRSFIQKINTLHASKQEMRSEIASARKKWDENNILIQWLHEKNPFNRQDVLQHVSSIFVSMKAGKKVTVPGKRKEFKHGKPEIKQEGLRIPRGPLHEEGLYGSIMVNGKREIVIRYKLGKGAIGYLFRGKEKCEVKKNKTGEYILKDGIGDVLDSIVDKHIRSLVEVRLNRKFPKGETYRSKAEKAKKEGRKYDGEKRCKTALEQFKGLDKDPIYFDDDKTRVVKYVRCKTGLNAVRPLRYNDNNEPITYALPKNNHHVAIYRDKQGNAVESVCTFWEAVERNNHHIPSIIRNPGQVWDDIQRRETNGEELPAVLKKNLPKSDWTFVESMQQNEMFVLDMDRETLEQHIATGNYSAISPHLYRVQSLSDGDYMFRLHTDPKSERTLDANTSRRFIRLKFKKFIESEHHKVDISILGKISIAP

SEQ ID NO: 46 - protein, 1407 aa, Unknown
  OMNI nuclease sequence
MKKILGLDLGTNSIGWAVVSADENGNPTHIEGMGSRIIPMGSDKIDYEKGATITKNADRRTKRSARRMGKRYKMRRNKLLFILSRLNMLPEQIQFKTDFPEATKIQNLELLPISKNTMQLDSLQHYELREKALHGKIALQELGKILYQYNRLRGYSGGGDDNDSKIEKTEDDDNKKYEVRVQKFILKDVAKSDSTYIAKSGKDKGKELPIYNVIVLDEDEEIEGTTKLQTLSEKIGEEIELEIRIKKIKKGASIAFALPQKTNWRKQMEETEHFLKAKNYYPCQLFAEDLRNNKWTKIRNRVILREQYKREFDAVWDEQAKHYPILEKCPNDVLNEIVSYIFPGPSDSQKKLRELGLRNGLKYIIKEQIIYYQRPLKSQSNLIGTCQFEKEEKVIPVTHPLFQEFRCWDQINRLYIRSKQQIWNEKKGKFVLQYQNRYLTDEQKYSIYNRLQEQKQLGFKEVAKIVNLGDDKSEFLYGLHVKAKLSGCDTKISIKKILKGYFEPDTTLIEKIWEAVYNNVHEGSEYNESSKRVLSIIDILPETLGDERRTELALKIAQNIKFIRKYASLSKKAIENILPIMRPNPDVIPEKVKKNFEDIKWLIDTGEVIDESILQDYIIEFVKDNPQALEHGGLMYAFASSLVYGRHTKEDVKPQLKDYHDIKYVERNLRNPIVEQIANETMQVVKSLWKQFHLNPDGLEIRVELARDLKNSAKERENIFKAQNKNRSGNERIKERLKQENVPVTDLNILKYKLYEQQSYISPYTKNTIAFSKLFDDNFYNIDHIIPKSRYFDDSISNKVICESNINEEKDNRTAWEYICQQSSQYTILTPEAYLNHINSSFYGQKKKNLLAEKIPSNPVTRQMKDTQYISIAVKDELAKIVGSEHVKTTTGGVTDYLRSLWGLRKLFMELTEARFKQMELWNINEDGTPKESWVKKGYDKITHKNVYEIKGWSKRYDHRHHSIDALVVALCNEKFIKRLNDLNKYFQEELAKHKSSIPILDEDSLEIAFFNLPKEKRNKIMQEIESSRKFDAPFDNLVAEAKCQLESMIVSQKSKDKLSIKEDFNGKKQLKIRAALHQETYYGKTNGRDTKTIAISMLKAKDIPQIVDEVLKKEIDAHRKKYESMKEAFTGEGLIAFNESRFQTKNKSALKPPVYKVRLWYSNKEKETGNLQPLYGKAAKKTVVTGDNYMFIVMEKSGNRVFDIASLFDSVALAKEYVKQGIVDIDYIKKKICDDLRYNSSDSKGNKADKVIFYLQQNDLVYMPKEDDEILRFNELEFKNWLSNTKNKIDFAKRVYKVVKFTGKDCFFIPNNVAKEIIIPKDMSKEELDELKSKYKDKAIPKQEQNYIEYGTYSNCTPLEMNKLFTMSMREGKKYKGDRPRKIQDYCIKIKTDWLGNVIEFNDMKL

SEQ ID NO: 47 - protein, 1513 aa, Unknown
  OMNI nuclease sequence
MKKILGLDLGTNSIGWAVVERDNDNGRIIKSGSRIIPMDAATLGDFASGNTKSQTAERTSKRSARRMRERFLLRRERLHRLLHILGFLPKHYEEKIGWDLDNDRKHYGSFIENEEPKVAWIRNEEKKYEFMFQSSFHEMLEDFKKYHPDILSDGKKIPYDWTLYYLRLKALSQPISKEELAWIILNFNQKRGYNQQRDEVLEASDDKKEEYKCLTVLSVTPDEDAKGKDIWYNIRFENSDIVYRRKSKYPLNWVGKKRNIIVTTKLDEDGNPKLKKDGSIDYSVKSPNDDDWTLQKIKTEQDLKDSHQTVGQFIYAALLANPSEKIRGGIVRTIERDFYKEELETILKKQSQFHAELKDRSLYEKCINELYRNNESHRNNIAKNDFVFLILEDVLFYQRPLKSKKSLIDDCPYESHQGIDKETGEICTYPLKCIAKSNPYFQEYRVWKFMSDLRIIANTKEINGHIHTDVDVTSEFIPDNESWSNMFIWLNDKGHITQSDMLAYLGIKKKEQSKYRWNFVADKHYPMNATRHAILNRMKDDELLSRELEQAIWHLLYSTTSKAEIDKSLSPSDTPSCIYTKLIEAGFSEESIEKIKTIKLPDEGYGAYSEKAIKKLLPLMRCGKLWDEKGIHPSTLQRIDAFSKGEGMDDFSENVNQRLSSMSGIDSFQRLPEWLACYVVYGKHSEANDIVKWKSPDDINIYLNNFKQHSLRNPIVESVILETLRVVRDLWKRYGNIDEIHIEMGRELKNPSDKRAQITKRVLENENTNVRIKALLAEFLAEEYKIENVKPHSPSQQDLLRIYEEDVLAHNEPDDELKDIINSLSNPTKQPTRTQVLRYKCWLDQKYCSPYTGQPIPLSRLFTSDYEIEHIIPQSRYFDDSFSNKVICESEVNKLKDNQLGYEFIKQHHGQTVQLASGKMVRVLEVEHYEQLVKDNFAQTKRRKLLMDDIPAEFIQRQLNDSRYISKVIKGLLSNIVRTTDEDGNLEREAISKNVITCNGSVTTRLKRDWGLGEVWNFIILPRFQRLNELTGRNCFTTFNTHGNEIPAMPLELQKGFSFKRIDHRHHALDAIVIACTTREHVNLLNNESALPEHQEMKHALSHKLRRCEEIVINGKKRRIFKEFIMPWASFKNDTLLSLQQIVVSFKQNLRVLNQATNLYTKYVNGQKTLSAQHSSDHFAIRKSLHKDTVFGHVNLQRKTTIKLKDALKDVNRIVDKRLKRKIKELRAKHYNDKQLLVYFKDYAYEWKGYDFNKVEVFYFTDEKEPMVATRFCNDLVSIFSGKTKKQDVEKVIAQITDTGIQKILTNYLNENLDKIEYAFSAEGLELMNENIAKYNNGKQHKPIYKVRLTETLGQKFQIGITGNKAAKYVEAAKGTNLYFAVYQNEEGSRSFSTIPLNIVIERMKQHLSPVPECNDKGEFLQFYLSPGDLVYIPTIDEEINNIGNENDPHRIYKLVSCTSNEAHMVPAYIASPIIPTTELGSNNKSQRAWTGEMIKEICIPISINRIGEIKIK

SEQ ID NO: 48 - protein, 1528 aa, Unknown
  OMNI nuclease sequence
MIKKQILGLDLGTNSIGWAVVNKTQESDGVYHLDSIIDAGSRIIPMDAAMQSDFARGNTISQTADRTHFRGVRRLRERCLLRRERLHRVLYLMGFLPKHYSDSLTRYGKFKDCTECKLPWTTDEEGHFTFLFKKSYDEMLQIFWQVHPELMKQGMKVPYDWTIYYLRKKALVEAISGAELAWILLNFNQKRGYYQTRGEEQEENKTEKKEYYALKVVDVVDTNEKRGKDTWFDIYLENNMIYRRTAKEAPDWIGKVKEFIVTTQLNEDGTPKLDKEGKIRRSFRMPSENDWGLVKIKTQADIIDSHLTVGAYIFNALLANPKQKIKGKLVRTIERDFYKDELKAILDSQKRFIPQLQDNELYKECIKELYQQNDAYRNSISGHDFTYLFVDNIIFYQRPLKSKKSLIDECPYESHLYIDKEGKQVEKHVKCIAKSHPLFQEFRLWQFVANIRIFEHRKDENGRLLNDEDVTSQFLPDENSRVVLFEYLNDLSSITQKTLFEKYFGIKKTKGKNAEIPYRWNYVEDKQYPCNETRGEILSRLAKSEIDSSFLNNEAEESLWHILYSVNDRNELHKALVKFAQCHSIDSSFADVMVKFPPFGSDYGAYSAKAIKKLLSVMRMGKYWNQANIDASTLARINKIVDGEVDESISKRVREKTISLNDINSFRGLPLWLACYVVYNRHSETQDTDRWEKPEDIDAYLKTFKQHSLRNPVVEQVVTETLRVVGDIWKTHGHIDEIHVEMGREMKNPADKRKKMTERAVENENANLRVKALLTEFLNPEFEIENVRPYSPSQQELLRIYEDTALNSVDDLEDDISDIIRKFAQSEVSKRPSHSEVLRYKLWLDQHYVSPYTGQTIPLARLFTPDYEIEHVIPQSRYFDDSLSNKVICESAVNKLKDNCLGYEFIQKHHGEIVDLGGGRIVKILEMDSYCANIEKIYKNNRTKMKKLLMDDIPAEFIERQLNDSRYISKLIKGLLSKIVREDDEQEATSKNVVVCTGSVTDRLKREWGINDVWNHIILPRFERMNELTGTNKFTSISSSGHLIPDMPLELQKGFSKKRIDHRHHAMDAIVIACTTRDHVNLLSNEAASPKSNQNRYQLSRKLRRYEEVTIKRDGEIKTISVAKEFKMPWPSFASDVEKALNNIIVSFKQNLRVIVKTSNHSMRFVDGKKRMLKQTKGDSWAIRKSMHKETVFGEVNLRRVKTFPLKEAMKRPERILDSELKDRIKAMVKLGYSEKQVKAYFVENKDMWSDIDIKKIQMYYFTKETSDRFFATRKNIDTSFDENKITNKITDTGIQKIMQRHLANYGGDADLAFSPDGIDEMNRNIKELNGGTDHQPIYKVRVYEKANKFAVGQKYNKQSKFVEADDGTNLFFAICENEVQNKQTGEIKKKRSFRTIPLNEAISKMKLGQPLDENALFILSPNDLVYLPTEEEVGCEKIGNIDYSRLYKFVSAAGFRADFVPVNSANTIYDVKKDYAELFCNDAVVQNEFGVGSPKSKNERAITGEMIKETCIPIKVDRLGHILKIGV

SEQ ID NO: 49 - protein, 1543 aa, Unknown
  OMNI nuclease sequence
MSNKNILGLDLGTNSIGWAVVKCIDNEDTERKLIGLVDAGSRIIPMDAAMQSDFAKGNTVSQTKERTQYRSVRRIRERHLLRRERLHRVLSLMGMLPRHYAQALTRYGKFKDDVECRLPWAEGSEGMPVFIFQQSYDEMLQIFWQEHPELMAKGMKVPYDWTLYYLRHKALHQAISGEELSWILLNFNQKRGYYQARGEEDDVDTSKEEKYYALKVVDVVNSGDKRGKDTWYNVFLENGLVYRRSAKEKPDWVGKVKDFIVTTQLNEDGTPKRGKDGEVKRSISMPKEENWGLLKIKTEDDIRSSGQSVGEYIFGALLRNPKQKIKGQLVRTIERTFYKEELRGILEKQREYIPQLRDAALYEACINELYPQNDAYRQSIASKGFTYLLLDNIIFYQRPLKSKKSMIDECPYEYHECLDVNGEKMKKYVKCIAKSHPLYQEFRLWQFVSNLRIYQCSIDDEDVTSQFLPDEESRACLFDWLNDRDSIKEEILLTKYFGLKKPKGKNVVLPYRWNYVRDKSYPCNETRGKILERLSKNGVDTSFLDVENKNEKNVEEGLWHILYSVNDPEQLRRALRTFAQKCVAKRCILNQSANDEAMPDGDAAWINAFVDAMVKFPPFENDYGAYSAKAVKKLLSLMRMGHHWRADDIDEKTRSRIQKLIDGEFDESIRERVREKAISLDRLEKFRGLPLWLACYVVYNRHSEASDLSRWQTPDDIDAYLKSFKQHSLRNPVVEQVVTETLRTVRDIWRKYGSIDEIHVELGRELKAPADQRAQMTERALQGENTNLRIKALLTEFLNPELGIENVRPFSPSQQELLRIYEDTALNSVSEPDDYVTEIITKFADAKKRPTFSEVKRYALWLEQHYVSPYTGETIPLARLFTTDYEIEHVIPQSRYFDDSLSNKVICEAEVNKLKGNALGFEFIKQHHGEKVILNGGRVVTILETDSYSDLVNNVYGKSNRAKMRKLFLEDIPAEFIERQMNDSRYICKMVTSLLSHIVREEEEEEAKSKHIVVCTGAVTDRLKRDWGVNDVWNRIILPRFERMNKITNTQKFTTISTSGHLIPAMPLELQRGFSKKRIDHRHHAMDAIVIACATRDHVNLLSNEAALPKNQANRYQLSRKLRRYEDVLVCREGRSRKISVAKEFLLPWPTFTTDVEHALRQILVSFKQYLRVITKATNHTLRIVNGKKISVPQTLGDSWAIRKSMHKETVFGEINLRRTKTFGLKQALQLPRRIVNRDLRGKIMQLLELKYTEKQIKAYFSENAEAWSDVNLKQIEMYYFTKETSDRFFATRKSIDTSFNRKAINEKVADTAIQKIMLRHLEQYADDATLAFSPDGIDQMNSNILALNDGKYHQPIYKVRVYEKAEKFAVGQKGSKSRKFVEAAKGTNLFFAIYEQTAVDPATGLSVKKRSYRTIPLNEAILKMKQGVPLDSKASFILSPGDLVYVPTKEERRTGQMESPIDNERVYKMVSSGKGQVDFVPYSAASVIFSVSKENSSHYSGIQNEFGVGSPKSKNERALTGEMIKEVCLPIKVDRLGHLIEK

SEQ ID NO: 50 - protein, 1574 aa, Unknown
  OMNI nuclease sequence
MKKILGLDLGTNSIGWAVVNADEATRKDNTKYLKPNSISCAGSRIIPISADILGDFDKGNSISQTAERTRLRMMRRLLERNHLRRERLLRVLKVMDFLPEHYNSKISRYGKFIDDSEPKLPWRKSKDGKMEFLFQESFDEMLAEFKQHHPQLLANGKKVPYDWTIYYLRKKALTQRITKEELAWILLQFNQKRGYYQLRGEEEEEKANETIEIISAKILSVEKKEKDKKYEKYWYEMHLENGMTYRATFYNDVTSWEGETKDFVLKRTTLKDGTPKNELSFLPTPEEIDLMDAQRKAKMYAKIKLRTEKEIENSHKTVGSYIYDSLLQNPNQKIIGKLVRTVERKFYKDELKKILEVQQELIPELKDEALYQRCIEELYAANEAHRRSLSKPDYVNLFLNDILFYQRPLKSKKSLIDDCPYEYHVSKDGEQHPIKCIAKSNPYFQEFRLWQFVQNLRIYQRERTVTDGQLDLFTNTTTNKLQTDVDVTSEILKTEEDYVKLFNWLNDRSSIKQDTLLSSYFKAKKEKGKDKYPYRWNYVEDKDYPCNETRATILSGLAKCNISADFLTHENEMSLWHILYSIEDKAELYKALKKFAHRHQLEENFPEVLSKTKPFKKDYGSYSEKAIKKLLPLMRMGNYWNEEQIDAKTRERIEKIIDGEYDENIKNRVREKAISLTDIQHFRGLPVWLACYIVYDRHSEAKVVEKWEKPEDIDYYLKNFKQHSLRNPIVEQVITETLRTVRDIWKQEGQIDEIHVELGREMKNPADKRRQMTERIQQNENTNLRIKAMLMEFMNPDMGIENVRPHSPSQQDILRIYEENALDNLSKEDKDYDFVSKISKVAQPSKSDIIRYKCWLEQKYQSPYTGKMIPLSKLFTPAYEIEHVIPQSRYFDDSFSNKVICEAEVNKLKDRQLGFEFIKNHAGEIVQLSQGGTVTIMSVEAYERFVKDYYSNNRTKMKKLLMDDIPDGFIERQMNDSRYISKVVKGLLSNIVREKQEDGEYQSSREYEQEAVSKNVISCTGSITDRLKKDWGMNDVWNNIVLPRFKRLNEVTGKDCFTTYSREGHEIPNMPLELQKGFNKKRIDHRHHAMDAIVIACATRDHVNLLNNEAAHSKHNVNRYQLQHKLRRFATIKINGKEREIAQEFLKPWESFTTDAWQVLSNIIVSFKQNLRIINKTTNRYQHCEDGGKKGFEKQHKGESWAVRKSMHKDTVFGEVNLRLKKTVSLNEAIKKPENIVNKEFKKKVIELLDHGRDAKFIKKYIDDNKDVWSDINPAKIEIFYFSKDEKKRNGEPKERYFATRKSLDTTFDEKKIKESVTDTGIQKILLAHLTTKENNPEQAFSPDGIEEMNRNITALNNGKFHQPILKVRVYEKADKFAVGQTGNKTKKFVEAAKGTNLFFAFFGTEKEIKSNGRKEIVRSFMTIPLNVMIDCQKKYGIQWRNNIEDYLRGKDMIDADAKLLFILSPNDLVYLPRENDRKEDIMPLDKQRIYKFIDPAQDKGNFVQYSVAKAIFSAKFTDQKKQGISYPIQDEFGLGSQQTKSPRAITGEMIKETCIPIKVDRLGNVIEINGSPL

SEQ ID NO: 51 - protein, 1516 aa, Unknown
  OMNI nuclease sequence
MKTILGLDLGTNSIGWAVVQEKDNEIYKYLKQVLGAGSRIIPMDAAQLGDFAKGNTISQTKERTEYRGGRRLRERCLLRRERLFRILDIMGFLPPHFAEELTRYGKFKNADKEPKIAWKKDNEGRMGFLFVESFNEMLKDFSTTYPDILKNGMKVPYDWTIYYLRKKALTNAITPFELAWILLNFNQKRGYYQFRGDEEQAETTKYEEYLAQKVVDVIDTGEKKGKSTWFDIVLENGMVYHRPADTKPDWIGKTKEFIVTTPLDKDGNPKKDKKGNIKMSFRMPSEDDWNLQKKKAEKDIDESGMTVGEYIYDALLHNPKQKIKGKLVRVVERKYYKDELRKILESQKRFIPQLTDTALYNKCIEELYQSNEAYRNSISARNDFSYLFVDNVIFYQRPPKSKKSLIDNCPYESHLYIKDDKEYKAPVKCIAKSHPLYQEFRLWQFISNLRIYQRQMQIGDKVKLDVDVTNQYIPTEESREALFDYLNDRTEIKQDTLLKDFFNMKKPKNKDGVFPCRWNYVEDKSYPCNETRGKIIANLKKAGLSSDFLSNGNNEEALWHILYSVEDKDELRKALARFAAKNSLDDRFTEALADIEPYKKEYGAYSAKALKKLLPLMRLGRYWNYNHIDTETQERVNCIINGEYDESIRNRVREKTISLTSATQFRGLPLWLACYIVYDRHSERAETGKWSSPEDIDEYLNDFKQHSLRNPIVEQVVTETLRTVRDVWKKHGKIDEIHVELGREMKNPANKRNEMNRRMLENENANIRAKLLLTEFLNPELGIENVRPYSPSQQELLRLYEDGAISNAGNDIDDEISDIIGKLSQVDIKKQPTTSEVKRYMLWLEQNYRSPYTGEMIPLAKLFTSAYEIEHVIPQSRYFDDSFSNKVICEAEVNKLKDRMLGYEFIKQHKGEKVQLSMGRTVEILSPEEYVRHVESQYKNNKVKMRKLLMDDIPDEFINRQLNDSRYISKLIISLLSNIVREVGEEEATSKNVISCNGAITDRLKKDWGINDVWNHIILPRFVRLNKLTGTDKFTTVNKEGHEVPTMPLELQKGFNKKRIDHRHHAMDAIVIACTTRDHVNLLNNEAAMSKNNANRIQLSKKLRRYETVEVVKDGMRKQISVAKEFKKPWDSFTTDVEQILKGIVVSFKQNLRVINKTTNYYQHIKDGKKVFSPQSKGDSWAIRKPMHKDTVFGEINLRRIKDVSLKEAMKHPKDIADKELREKILELMALQYNEKKIKLYFDENKDVWSDVNTKKISIYFFTKETNERFFATRKVLDTSFDKKKIQTQVADTAIQKILLKHLSAHEDNAEIAFSPDGIDEMNRNIIELNDGKCHQPMFKVRVYEKAEKFAVGQQGSKKKKFVEAAKGTNLFFAIYEEEQIDNKTGNAVMVRSFDTIPLNVVIDREKHGLSPAPENKNGTKPKYVLSPNDFVYVPTEEEKATGRIRKLLNKERIYKMVSCTGKECYFVPYSSAKPIYDKVEYFSLNKMGRALSGEMIKEICIPLSINRIGEITICE

SEQ ID NO: 52 - protein, 1481 aa, Unknown
  OMNI nuclease sequence
MKNILGLDLGTNSIGWAVVTSNDNTNEKPQVELGSRIIPMSQDVLGKFDSGVTQSQTAERTGYRGARRIRERYLLRRERLFRVLHILGFLPRHFEESIGWDKNDNKTYGKFKDDSEPKLAWDDSDKNNNHFIFVDSFNEMLEEFKKKNPSFISSDKKIPYDWTMYYLRDKATRQPISKQELAWIILNFNQKRGYYQLRGEDEEENTKHKTEEYYELRIDRVEATNEKRGNDIWYNIYLENGWVYRRSSRIPLEDWVGKKKEFIVTTEYNEDGSIKLDKDGNEKRSFRAPKDDDWGLQKKKTEFQIDSSEQTVGSFIYNHLLANPTEKIRGKVVRTIERKYYKQELGKILAKQKDFIPELSNSALLEQCIHELYANNTAHQDSLRKKDINYLIIDDIIFYQRPLKSKKSLIADCPYEQYEYINKNTGEIKKQHIKCIAKSNPYYQEFRIWQFIQNLRLYSNDLDNTDVTKNYLKNEEDYVHLFKYLNNLKEISQETLLKDFFSIKKPKGKDSIYPVRWNYVEDKKYPCNSTRYQMLAALKDAEIPDTLIDNRNTEYRLWHLLYSVEDRNELISALCSFARDNKLPESFVDCFKKIPSYKKEYGAYSEKAVKKLLSVMRVGSLWSEDNLPNNIHNVINGTIDEKVKKRIEHKGFFLSEKQSFRGLPEWLACYVVYGRHSETSDISRWETPQDLANFIHDFKQHSLRNPIVEQCILETLRTVHDIWVRHGRIDEIHVELGRSMKSTAEQRERMSKTIIQNENTNLRIKNLLLELKNDSTIKDVRPYSPMQQDLLRIYEEGALLTLKRDDKDYNEISRISKLSAPTQSELTRYKLWLEQRYRSPYTGKTISLSKLFTPAYQIEHVIPQGRYFDDSFSNKVICEAEVNQRKSNMLGYEFIQKCGGEIIHCATLGDVKVLTAKEYKDFVSDHYDPKSSKAQKLMMDDIPETFIQRQMNDTRYISKVIKSLLSNIVREKDEIDAISKNVIPCTGGITERLKNDWGLKHVWNSIVAPRFIRMNQLTNSEAFGHWENKDGKRVFQTTMPIELEKGFSKKRIDHRHHALDALVIALASRNIISYLNNESARDTNRREDLRRLLCDKNRIIRKPWNTFTQDAYVALQNIVVSFKNYVRVINKASNYYEHYDENGRKKPIAQKGEEQWAIRKPLHKETVFGQVNLQRKREVSFAKAIEQVSCIVDKDLRNTIKSMIKAGMDESQIRKHFKAQNNIYAGKSINKVEVYYYTDSVEPMVATRKLLDDSFDEKKILSITDTGIQSILLNYLEAKGNDPKLAFSPEGIMEMNENIAKYNNGKFHQPIIRVRVSEPKGEKYNIGTTKNKAKKFVEAQSGTNLFFAIYETENGNRSYKTIPFNQVVERMKMGWTPVPEKNENGDKLKFYLSPNELVYVPTEEERMSNSININKDRIYKMVSATGNQVFYVRHNIASVIENKVELQSLNKMEKTMEGEMIKSICWKLEVDRLGNITNIIR

SEQ ID NO: 53 - protein, 1446 aa, Unknown
  OMNI nuclease sequence
MKRILGLDLGTNSIGWALIDGEKNTIIKAGSRIIPMDAKAMSEYETGNLQSATSVRTDFRGTRRLYERAVLRRERLLRVLNVLGFLPEHFKNQIDFEKHLGQFINHGEPLLPYRRTEDNKNVFIFADSFYEMIADFSLHHPELTENGKRVPYDWTIFYLRKKALSKPIKKEELAWLILNFNTKRGYYQLRGMENETKTNDGEEYKILKVIDVEKTNEDKKRKGIFWYEITYENGAKQRKSGPVAPRKIGDMVEVIVTTSYDKDGNIKTDKEGNPKISISTPSADEWKLLKKKSENAIKESGKTVGEYIYDELLVNPNIKVKGKLIRVIDRPFYKDELKRIIDKQSEFIPELRDRSLYEKCIRELYHQNEAHVQSIMDKSFTDLFVEDIIFYQRPLKSKKSEIANCPFENYHYIDKESGEIVNKPIKCIPKSHPLFQEFRLLQFTQNLKIFKREKVVNGKLKTDVDVTSDFLSTLEDYAALFEWLNNKKDINEKELLRYPSFNIGKNVSEYRWNYVEDKSYPCNETHYLINRQLDDVGTSLTPDQECALWHILYSVDDIILLRKALKSFAKKYDINTELFVKAFEHIEPFDNDYGAYSEKAIKKLLPFMRKGMRLHDACYEVYGRFSETADTDKWTTPEDIDRYLEFEFKQHSLRNPVVESILGETMRVVRDIWKTYGEISEVHVEMGRDLKKSNQERRDTTDRIRKNEQTNLRIRLLLQEFLNPEYKIDGVRPHSPSQQEIFKIFEENALANINEDAESDDIQMIADNLGNPSKHVSQSEIMRYRLWLEQKYKSPYTGQTIPLSKLFTTAYEIEHVIPQSRYFDDSLSNKVICESEVNKLKDRMLGYEFITKHGGEIIQGNFGTQIKILDKIQYEEFVKQHYASNKGKMKKLLMEDIPDNFIERQLNDSRYIARKTISILSKLVREENETEATSKNVIVTTGNITDRLKKEWGVNAVWNDIIAPRFIRLNTITGTHNYGEMINREGKQYFQINVPLEISRGFSKKRIDHRHHAMDAIVIACTTRNHVNYLNNKAALSSEKDLRYDLQHKLCTKVKTDDRGNYTWQFNKPWESFTQDVRRELASIIVSFKQNLRVINKMTNFYWHYENGKKVLTRQTKGDGWAIRKSLHKAGVSGTVRLQTKKTVKLSDALNCVSMIVDKEIRKEIKDVISTYGKLYEKKTILKYFKDRNYKVGKKDVSRVEIYYTPEIAELSAKRVLLDTSFDEKTIKSITDTGIQNILLKHLANNGNDPKIAFTPEGIANMNDHLKELNDGKEHKPILRVRKTESFGLKFPVGEVGNKSKKYVEADKGTNLFFAIYIDEDGNRSYESIPFNVAVERLKIGAQVAQEINEEGKKLLFVLSPGDLVYIPDEGEHVDDITNNNRIYKMVSASGRQCFFVPYYIASPITCPLELGANNKAEKNWDDIMIKSTCVKLQVDRLGIVTKIFQ

SEQ ID NO: 54 - protein, 1448 aa, Unknown
  OMNI nuclease sequence
MSNKILGIDLGTNSIGLSLRNTEIVGGIKEQLEYFSSIIFPSGVGKNKTGEFSYAAERTKNRSTRKIYKVRRYRKWETLKLLIENDCCPLSMEDLQKWSKYDKIKGLKRQYPIHATHFEQWIRLDFDGDGKADYASPFELRAILMERQFDFSEMTDRYKLGRALYHIAQRRGFKSSKGETLKEQEQNEKGELQEVDITDALKKSEEKKSGKLTEYMKVHNLPTVGCAFNHLLKNGIRVRNSEYQAVRSQYKEEISCIFEFQKGLDKESDFYKRLVSEKKGEGTIFYKRPLRSQKGAVGKCTLEPNKPRCPISHPEFEKFRAWSFINNIKFGEDLSEELTLKQKKDLYKEKFLLSRKSFKFEVIREWICRRTGMTLNYKNKTINFKDSTSVSGCPISGRLKRLLGDDWECWKLESTEKKINKKTGEVRKITYDVYDLWHVCFSFDEAEYVDDFAKSKLKFDDNQAKQLVAIFNDIQQGYSQLSLKAIRNINMFLQEGLLYNDAVLLAKLPDIFGCRWEEAKEYVVSQIDSIIKENRKEKLLYSIANQLIGNYKCLSYDERFADHNFDYILDDSDYNDIKNAILNVIGEKKWSKKDTSEQSEILNDVAQLYQGFFASPKRDYYKTRKVADALAEFLSGKYDFLPKKELNKIYHPSMIEFYSPAKEQRLDDGRWLKLLGSPVIGAMKNPMAMRVLHTLRKRINAMLMESMIDADDTRIVVETARELNDANMRWAIEAYQREREKENKEYEKILKEYYPGRSISDKEIDQVRLMCDQHDIPGDDNNTDMGRRKTAKNKKEVPPVYKKDVTRYRLWLEQGCRCLYTGKIINITKLFDENAFDIEHTIPRSISFDDSLKNLTICDAHYNRSVKKNQMPTQMANYKEDANGYTAILPRLQPWIEKVERLKDNVAFWKAQSKLSQDKERKDYCIRQHHLWVMELDYWKGKVERFTMTDVTSGFRNNQLNDTRIITKYAYHYLKTVFDRVSVQKGSVTANFRKILRIQSVNEKKSREKHSHHAIDATVLTLIPNAEMRDKIIKTFYSIKERERFNEDASALKKELAKELKNCQLPSNISEIVPFIEDNILVNHISKDQTLTPAHRRKRIRGKIVPKRDEHGIILYETNADGTTRKNKHGHPIPQAKEWISGDSIRGQLHKDSFFGAITQWLKDNNGEKVLDKKGNIISDTKIYYVIRRILKYKSSDTDSGFKNWEELKSVIVDKDLFMIMKNQFPENTSFKDACEHGIYMYKNNKSGILDFSDECKLTKIRHIRCFTSVKNPLAIKSQTYLSTKPYKQKYYADMGDLYAMCRYESVDKKEREYQLFSLFDISKNRKLGLEDIPTTIESKKNHRLFLIHMLKKGNMLLVYNDSEEALKEKDNKALLQHLYVVRGFENDGNRIILQKHVNAQQDKDLGKGESVKGSHQMPEKIRCGINTIKYLLCGIDFKITPKGVVFV

SEQ ID NO: 55 - protein, 1512 aa, Unknown
  OMNI nuclease sequence
MDEKRHILGLDLGTNSIGWAVVGETVDNVGNRKIEEIIDAGSRIIPMDAAMQSDFARGNSISQTADRTRYRSVRRLRERCLLRRERLHRVLALMGFLPKHFSDNLTRYGKFKDDVECKLAWANDDNGQPAFVFRRSYDEMLQLFWQVHPELMKQGMKVPYDWTIYYLRKKALTEAISGEELAWILLNFNQKRGYYQTRGEEQEEDKTKKEEYYALRVVDVVDTNEKRGRDTWYDVHLENGFVYHCKSKEKPDWIGKIKEFVVTTQLNEDGSPKTDKDGKERRSFRMPSENDWGLVKIKTQADIEKSGNTVGTYIFNALLANPKQKIKGKLVRTIERDFYKYELCAILNSQKRFIPQLQDNNLYEDCIEELYQQNTAYRNSISSHDFTYLFVDNIIFYQRPLKSKKSLIDECPYESHVYIDKDGNTVENHVKCIAKSNPMFQEFRLWQFVSNLKIYEHQKDENGRILEDKDVTCMFLADEHSRAALFTYLNDRSSITQKELLEKYFNIKKPRNKDAEMPYRWNYVEDKQYPCNETRGEIIKRLSKAGIDTDFLDHQAEMSLWHILYSVNDRLELHKALERFAQRNDLGSAFAGIMSKFPPFESDYGAYSEKAIKKLLPLMRMGDYWHEEDIDKSTLARINKIIDGEVDESISERTRNKAISLTNVNNFKGLPLWLACYVVYNRHSEAQDNDRWEKPDDIDAYLKKFKQHSLRNPVVEQVVTETLRVVKDIWKTHSHIDEIHVEMGRDMKNPSDKRKKMTERAIENENANLRIKALLAEFLNPEFGIENVRPYSPSQQEILRIYEDTALNSVDEPDDYIQEIVNKFTQSDVTKRPTRSEVLRYKLWLEQHYVSPYTGQTIPLSRLFTTDYEIEHVIPQSRYFDDSLSNKVICEAAVNKLKDNSLGYEFILKHHGEIVELGGGKRVQILEADSYCASVERTYKNNRAKMKKLLMEDIPSEFIERQMNDSRYISKLVKGLLSKIVMEEDEQEATSKNLIVCSGSVTDRLKREWGINDVWNHIVLPRFIRMNELTGTARFTTTSSSGHLIPDMPLELQKGFNKKRIDHRHHAMDAIVIACTTRDHVNLLSNEAASPKSNANRHQLSHKFRRYETVKVEKDGEVKTISVAKEFIMPWPSFPTDVEKVLNDIVVSFKQNLRVINKTSNHSLRYVDGKKKMVKQTAGDSWAIRKSMHKETVFGEVNLRFVKSFPLSEAIKRPNRILDKELKEKIKAMVKLEYTEKQIKAYFKENKDVWSDIDLKKIDMYYFTKETSDRLFATRKNIDTSFNEKKIKGEITDTAIQKIMLNHLAKYEGKSEFAFSPDGIDDMNRHIKELNGGNDHQPIYKVRVYEKADKFAVGQKGNKKTKFVEAAKGTNLFFAIYENEVLDKKTGEMIKKRSFRTIPLNEAISKMKAGLQLDEKAAFILSPNDLVYLPTEKELESGEISHPIDNSRIYKMVSSSKFQVYFVKVNVAASIQDKCEFSALNKMERALSGEMIKEICIPIKVDRLGHIIKIGI

SEQ ID NO: 56 - protein, 1250 aa, Unknown
  OMNI nuclease sequence
MNVLGLDLGPTSIGWALIEIENDNNPVSILGMGSRIIPYSNDTAASDFSKGKGESPCSERTRCRQMRRNIDRFQLHREQLRNLLLQIGMIDKNFKASPASPLEIWKSRADAATPGVKLPLDKLAAVLFQINHRRGYRHSKSDLGDSKQTEYVAKISDRYSEIRQTGKTVGQYFYGKLKDSEVINPNGTRYCTYRVKEKVCPRQAYEEEVDRILSVQSEFYPDVLTTENQKAIKQVIFYQRPLKSCKNLVSFCEFERHQFLNKAGKKVESGPKVTPRTSPLAQVCRIYEAINNIKLVNSRRKHKKSDSAPSLFDDPAVTGMDLRKFKEEYPFTDEERERIFQFLNTHEKMTEKDLLKILRLTSEDGFKCDKSLGKGIQGNTTRWQIANALGNHPAKEELLRFDISEEIPAENPDIVVSTGEVLPRISPSYVGQPFYMLWHTLYSINDKDELFKVLSEKFGIKDEETLNRLYALDFVKAGYANKSAKFIRKLLPLLKRGMMYSDACALLGVNHSNSMTKEETMSRELQPHLTPVLKGELRQPVVEKILNQTINVVNSIIDEYGEIDEVRVELARELKRDKEGREKMAQNINKNERENKALIEEIADLNILPTRRRIQKMKMLKETGNRCMYCGRPVTPYQFIEGHGYEIEHIVPRSRLFDDSFTNKVCACRECNSAKGAMTAFDFMKTRGEQEFNSYLDRVESLYKEGKISRGKRDRLLMSATTIPDDFIERDLRETQYISRKSMEILSESIRNVHASSGMVTDFFRHAWGYDTILHDINLPRYSEAGLAEEVEYETHGQKHAAYRIKDWSKRKDHRHHALDALVVALTRQGYIQRLNTLNASTENIGNLDKWAAERPHIERQAVVKALENVAISFKSGKKLTTPGKRYIRRGGRRICVQTGVTVPRSPLHKDTIYGCIRVDDGMKSLKFALQNLNLIKDKGISQQLASCLQENGGDIGKTLKALKKNPLTINGTPVENVACYREEIVVKYKIGAVTRKDVEYIVDGHIREIVKARFSEVGNSDKEFVKSLAERPLYSDEACRHQIRTIRLFTGIKKSSIAGVRKKESGEIIGYAQTQNNHHVAFYRNPDGKVVESVVSFWDCIKRKKAGLPAIIKNPADAWTILMAQGESESTDEIARTMPPDGSAFIMSLQRNEMVVLGMSDDEWRDAVASKDIFTVNRYLYRVWRLSTGDYCFKYHTNTTAAIGDGDKELRQYYRTTITSLFALHPRKVRVTLLGKIDLLSDDKENLML

SEQ ID NO: 57 - protein, 1391 aa, Unknown
  OMNI nuclease sequence
MYYLFYFIKFVRQTLKISIMKRILGLDLGVSSIGWALVNEAENEKEKSSIVKLGVRVNPLTVDEQTNFEKGKSITTNAERTQKRGMRRSLQRYKLRRAELIRKLKEAGFINDDSILYENGNRTTFETYRLRAKAATEEITLEEFARVLIMINKKRGYKSNRKAKGEDEGMLVDGMEVAKRLYDEDLTPGQYSLALVEQGKKYLPDYYQSDLQTELQRIWDKQQPFYPEILTNDLWKILQGKSKTYTKKRFDLYQISPPTLKRDEARKQLLQWRVDGLSKQLPIEVISAVVSELNGQINGTSGYLGKISDRSKELYFRKQTVGQYMMAILDNNPNASLRNMVFYRQDYLDEFNQIWETQAKFHPELTQELKHDIGNITIFYQRPLKSQKGLVSICELEKKKIETIVDGTKKVVTVGPKVCPKSSPLFQDFRIWQRLNDLEIIDTETRAHRPLEQEEKELLANELSIREKMTKQQVLKCLFTKTKGLELNFKELEGNTTQARLFAAYQQIIDMSGHGEYDFSKMAANEAREIVGSIFRALGYKTDMLCFDVALKGKALEQQPFYQIWHLLYSYEGDKSVTGDASLIAKIRDLYGFDNDEYAKVITQASFKPDYGSLSAKAIRNILPYMMAGNKYSVACEYSGYRHSARSLTKEELAHKELKDKLDLLPRNSLRNPVVEKILNQMINVVNEIVATYGKLDEIRIELARDLKQSAKDREEATNAINQATKLHEEYRKTLHDEFHIEHPTRSDILRYKLYMELSANGFKTLYSNTAIVRERLFSRDYDIEHIIPQASLFDDSFSNKTLELRNVNLKKGNTTAFDFVKNEYGEEASKDYKARIDDLLKNKKISSAKHDKLLMTGEDIPKDFINRDLRDSQYIARKAREILEDIVRVVNSTTGTITDRLREDWGLVDVMKELNWSKYEAIGQIVSWVNRDGNTIRHIKDWTKRNDHRHHAMDALTIAFTKHSIVQYYNNMNARADKTSDIYGIECKEMERHNDHLRFKVPVEGMREEAKRQLQNILVSIKSKTKVATRNDNRSKSKSAKGGVNHKVQLTPRAQLHKESIYGRRRKYETTFEKVGASFDAQKIATIASKEIREAMLRRLNEFGGDAKKAFTGKNSLEKKPLWLNADHSRAVPLKVKCVTLADFFTIRKPISKDLVLEKVVDPKIRALLQARLEEYGGDANKAFSNLDENPIWLNEERGIAVKHITINAGLYDPEPIHEKRDRQGKLILDKEGKPIAADFVQTGNNHHVAIFEDADGKLQEHIVSYYEAMARVSQGEPVIDYNYNVELGWRFRFTMKQNEYFVFPTDEFNPVEVDLTNPANYALISPHLFRVQKLSTKNYMFRHHLETSVEDKKELREMTWKRITNIEKLRNIIKVRINHIGQIVAVGEY

SEQ ID NO: 58 - protein, 1260 aa, Unknown
  OMNI nuclease sequence
MKILGLDLGIGSVGWALIETDDSRNPIRIIDMGCRIIPVSPDETKNFEKGSAETINGKRTFMRSARKRNYRYKMRRSLLKATLSALGMIDQKSEVALRSLSPMQLWQLRADAATPGKQITLAELGRVLMHLNQKRGYRHAKTDGNDSKQTQYVQGVNRNYADIKDLGMTIGQYQYSKLKESETHTAKGCSFVMHQIRDTVYPRQAYMEEFDTIMQVQARYYPAILTDEVIARLRDIIFFQRPLKSCKHLVSMCEFESHVVHKKADGSAVTVGPKVAPRTSPIAQATRLYEAINNITIVNSANRGNKDVKLYDEADFFNGVVPVALRKKDYVYRLNAEERQRIFDYLNTNEKLTATTLLKLLGLKKSDGFVPDKAIGRGIKGNDTYVRIASALGDYPGKEELLKFDLDIVDSGVVNADSGEILSIVSADVIKQPLYRLWHLLYSVSDKDELAGALGKQFGITDPEVVDRLCAIDFVTPGFSNRSAKFMRKLLPRLMDGITYADAAGAIGVNHSGSITSADNAQRPLDDRLKLLEKNSLRQPLVEKILNQMINVVNALVERYGAIDEARVELARQLKQSSEERVRATQSISKNEKENADIEAKIREFGIRPSRSRIQKYKMWEESGKVCMYCGIEVKDKEFLESHDAEVEHIIPRSLYFDDSFANKTCACHKCNHDKGNRTAYDYMSSLGGDKFAAYEQRVDNLYADGKISRRKHSYLLMKQSEIPTDFIERDLRQSQYIARKALEILRGTIRNVWASSGAVTGFFRHAWGYDNILHDLNVDKYQLAGLVENEEYEHRGQKHVRARIKGWTKRLDHRHHAIDALTIALTTQGYVQRLNNLSSQHGNLFDDLTQENVELRDNSSLLTKWAATRPHFTVEDVASRVSEIAISLKRGVRLATPAKRYIRRGGKRVLSQTGIVVPRGSLHEESIYGRIRVYDGAKAYKDAFQNPHLVVNNEVREEIERRIADAGNDVAKALKALKKSPFTVVINGEQHTLDTIPCYREEIVLRYKVDGLKATDVKYIVDKAVREAVAERYDECGGNQKLFQNSVNADPICLKGSPMPIKSVRCMTGLNAGSLAGVRKDGSGKIIGLAKTGDNHHVAFYRDENGKECSMITSRWGAIRRKLNGIPAVVTDPAAAWVRLEYIADEAVAAEIAASLPMPGWQFIQSMRRNDMFVLGMGDEAFADAVAAGDQSTLARHLYRVQTISNSDYRFRGHTETTVDESNEAKVMKSVLRIQSSGALAALTPRKVKVSLTGEIIPL

SEQ ID NO: 59 - protein, 1256 aa, Unknown
  OMNI nuclease sequence
MKVLGLDLGPTSIGWAIIEIDDKDNPVSILGMGSRIIPYGVDTASDDFSRGKGESPCSERTRYRQMRRNIDRFQLHRQQLKSLLLGLGIMKTDTITPAANPLDTWKLRADAATPGIKLSLEQLASVLLHINHRRGYKHAKSDIGDSKQTDYVSRINDRYAGIKQSGKTVGQYFYDRLKESEAINDNGKKSYTYRIKGKVCPRKAYEEETDRILAVQSEFYPEILTEGNRQAIKQTIFYQRPLKSCKNLVSFCQFERHEFLNKYGEKVENGPKVTPRSSPLAQICRIYEAINNIRLVNARRQCQKTDCTSSIFNGPASTTREVRKLMPEYRFNEEEYERIFDFLNTHEKMTEKDLFKLLGLAADDGFKSDKALGKGIQGNTTRWQIANALGDHPDKEKLLRFEIVEEHPASGPDIAASTGEGLPRIYPQYIHQPLYMLWHTLYSIKDKEELFKVLSAKFGINDTPTLNRLYALDFVQAGYANKSAKFIRKLLPLLKRGMMYSKACAMAGVNHSNSMTRAENEERELHPKLAQLRKGELRQPVVEKILNQTINVVNAIIDEFGVIDEVRIELARELKKDKEGREKMARDIARNERENRALADEISGLEIQPSRRRIQKMKMLKETGNRCMYCGKPVTPYQFIEGHGYDIEHIIPRSRLFDDSFANKVCACRECNAAKGAHTAFDFMKSRSEQDLNSYLDRVDELYRANKISRTKRDRLLMSASDIPDDFIQRDLRETQYITRKSMEILSAAIRNVHASSGMVTDFFRHAWGYDTILHDINLPRYEAAGLTENVEYQSHGQKHMAHRIRGWSKRKDHRHHALDALVVALTRQGYIQRLNTLNALSDKSDDGEKWSSLDRWAAERPHIGRQKVIEALEKVAVSYKPGKKLTTPGKRYVRKDGRRTCVQTGVTIPRAPLHKETVYGRIKIDDGEKDLKHALQNINLIKDDGIRQQLAMRLQENDGNIPLTIKALKKNNLEVGGRSVENVRCYREEIVVRYPLESIRYKDLRYIVDPHIREIVQTRFTEVGNADKDFVKSLTERPLYSDKNCRHQIRAIRLISGLNPSTLAGVRRDQSGDTIGYAQTRNNHHLALYRNPDGSIVESVVSFWDCIKRKQAGLPPIIKNPAEAWDTVIANSESARFAGIADTLPPDGSEFIMSLQRNEMVVLGMSDDEWNDAVASNDFRTINRHLYRVWKLSSGKYCFKFHTNTSAAIEDGDREIRQFYVTSLSSLRALHPRKITISILGNPDSLSDDKESPML

SEQ ID NO: 60 - protein, 1374 aa, Unknown
  OMNI nuclease sequence
MKQKILGLDLGTNSIGISVRNTQKSGKITDQLEYFSSFIFPSGVGIGKSGEFSYAAQRTEARSTRRLYQSRRYRIWATLEVLTDLGFCPLSKEDLHAWCTYSKKENLFREYPADAKEFEQWVRLDFDNDGVPEYTSPYQLRAELMERQFDFGNPLERYKFGRALYHIAQRRGFKSSKGETLESQEDTANGVEVDVASELKKSEEKKAKGLKEYMGQNNCPTVGCAFYRMEQEGLRVRANEQMQAVRSMYEEEIDSIFTYQNGLSKDSELYRRIMSHKKGEGCIFYKRPLRSQKGTVGKCTLEKNKSRCPISRPEFEQFRAWSIINNLRYKTKDDSGKPSRELELSIRQQLYEEKFVRASNFKMEDILKWLKKKNSDVAELNYEDKTSVMGSPVCAKLKDILGDDWQHQTIEGYDYVELWHVCFQADEAENVKDFSITHLHADEVLCAKMIKLWGAIRPDYASLSLKAICNILRMLQEGYIYSDAVVLAKLPDVFGDNWEKVKEPILNEWISIQSTIEHSRLVAKITNNLIAEYKVLPAEDQFAFRNTDYLLDESDKKQIQKAIISNLSPKRWKQLTKQEQIDLQENVANAYQQFFKSQERNYLPIQHLTDALSSLIIDNFGDFVADNYKSKLEQGRDIFYHPSIVSIYAPQEPREVVTNRGIRQMKLLGSPATNVFRNPVVMRVLYQLRTTLNQLIADGIIDESDTSVVVETAREFNDANMRAAIAQYQRDREKENEKYKSELASYYPDRNISSTDIDKVRIWHEQGERCIYTGDIISLSNLLNDDSFEIEHTLPRSISFDDSLANKTICSAHYNRYVKKNLFPSELPEVDYQAILTRIEPWQEKIRSIKAQITLRKNKSKSATTPDMKNKAIKERHILEMELRYWQDKVSRFTIKKDDWNPGFRSNQLNDTRTITKYAYHFLRSVFGEVTVQRGEMTANFRKALGIQSMDERKDRGKHSHHAVDATMLTLIPGNTKRDQLLDLFYQREELQRRMESDASVKDALDEVSKQYTQILKSCDICGVDEVTEYIQNHILIHHCTKDQTLTPSKRRMRTRGKVVVKDGSERWVMGNSIRAQLHKGSYFGAIQSGETNANGEKEILMVARVPIDAFKSKDDIEKIVDSRVRTSVLHVVNKRMSEGMSFADALKQPIWMQDNNGQEIKMDKYGRRLQPIRHVRCKVAAGMGFLTKDKALPIREQVYTSKNTYKNYVYAQNDGNYLCLLYQGEYKGKLVRKMQFVNYFTIAQLGIRNIQELMQLPSYQTIEDGKKTYTLTAIMKTGTHVLMWKDYPEELRDMDPEQLYKRLYWVYKFNNSGSDYVFVQNHLEARSNDQIPKDETTFIPEQYQARLKLNANACNFLIEGVNFRITETGIEFL

SEQ ID NO: 61 - protein, 1209 aa, Unknown
  OMNI nuclease sequence
MKRILGLDTGTNSLGWAVVDRFDDGKYNLVRRGTLIFQEGVKIEKGIESSKAAERTEYRSSRRHYFRRRLRKIETLKVLIKYRLCPALTEEELKLWHLKKKYPMNEAFLQWQRTNDNTDVNPYHCRHIFLHEKLNLEKESDRFILGRAFYHLAQRRGFLSNRLDQTKENDDGMVKTSISQLGKDMQEAGCEYLGDYFYKLYQEKSNTIRIRKNYTSRKDHYIKEFNAICDCQNLPDDMRKALYDALYFQRPLKSQRYSVGKCTFEKNKPRCAVSHPLYEEFRKLSFINNIRVRVDFFGKGEERPLNEEEIKKIDKLFYRKSKNFDFEDIAKAIAGKDNYQWLKAEGDKQYKFNYRMDQGVSGCPTQTELKDLFGDDWMNGIAERYTCNKHQDGTPKTQEEMATDIWNVLFSFDDDGKVKEFGRKKLQMSEEEAEKFANIKLQQGYASLSLKAIHKILPFLRQGDIYTYAVFLAKVPDIVGHGIWERDKDEIIADLKYNIDLAIKEHRRIDEAVRGYLENNFELRPGILDDLYHPSINDVYEDAKPNKDGILQLGSPKTNAVRNPMAMRSLHQVRKVVNQLLLEGVIDRNTEVHIEYARDLNDANMRQAISSYQGDQKNEHNKAAKEIRKLYNEETGMDIEPTDDDILKFQLWNEQEHKCIYTGATIGIADFVGADSKFDIEHTIPQSVGGDSTRMNLTLCDAKFNREVKKAQLPSQLSDYDNIMEHIKPWKDKIEDLTRQIKKIRTYSGMDKREKDSKIQKRNRLKIELDYWKGKYERFTMKDVPEGFARRQGAGIGLISKYAGLYLRSLFHDPANPDKRQIYIVKGPMTAEFRKMWGVQEEYEKKSRDNHAHHCIDAIVIACIGKAEYDRLAFYYTQVEKGVKPEFEKPWNTFTQDVKKIADELLVVHDTPDNMPKHTRKRVRISGRGIKMAQGDSARGKLHEETYYGAIKKDDEINYVSRRSLEKLKETDVDNIVDDVVRQKIKDAVSSKGFKEAIKGPIFMNEEKGILIKKVRCYAKMVKNPLIIRQQRDVSAKDYKQQFYVTTDTNYCMAIYEGMLNGKLKRSYEIVDMIEASKYYKESNDTKNVYPIVPENRKELKYKCMVKTGTQVILLQNSEEKLDLDDEKSLSKRLYHVAGMFKDGRLVLRSNKEAREAGKLSKETQAGVYKESDDYRSQIRISLSDFHALIEGYDFKFTPLGDIKLINHA

SEQ ID NO: 62 - protein, 1204 aa, Unknown
  OMNI nuclease sequence
MERILGIDTGTNSLGWAIVDKDDNEYHLVAKGTNIFSEGVKIEKGIESSKASERTGYRSVRKHYWRRKIRKIRLLTILSENNLCPPLKKEQLRLWRLKKVYPVDDDFMGWQRTEDKANVNPYKFRYICLTEKLDLTNVTQRYILGRALYHLNQRRGFLSNRKDSTKESEGAVKEGISSLSDDMKASGCEYLGEYFYQLYQKGEKIRNHYTARKEHYLKEFHAICEKQELDAFFVEKLEKAIFDQRPLKSQKGQVGTCTFEKGKPRCPSSHPLYEDFRMYSFLNNIKVQVNTLYEKGERYLTAEEKRQIIPLFKRKSKRTFPFEDIAKKLAGKNNYCYYKDEEEKPYRFNYQMDTQVSGSPVNAQLEELFGEDWLSGVCEVYTLAKDKTRFQIMNDVWHALFFYDDEDKLREFAQNRLQLDEAQAVKFSKISVPNDYAALSLKAIRKILPYMRHYGLIYSEAVFLANLVDVLPGYVWGVKEMREAAIENVIDVMHSYDKKNIDGITLEACVKGFLKERYQVDDDTLKKLYHPSMLDLYPRQRANQDGIYQLGSPRISSVKNPMAMHSLFRLRKVVNLMLKKGYITPETKIHIEFSRDLNDANMRWAIQTWQRENEKDRERCRKEIEKYVATPTEKDILKYQLWEEQNHKCLYTGEEISLTDFLGKDPRYDIEHTIPRSAGGDSTKMNLTLCSNSYNRDIKKTKLPSQLAAHEEILERIKAWKEKYEELDHIFRKLKGSSASTKEEKDRIIRKKNLLKLQRDYWRGKYERFTMTEVPEGFSRRQGTDISVISRYARMYLKSVFKQVYIVKGIATSDFRKLWGIQEDYARKERVNHVHHCIDAITIACIGKAEYDKLAQYYHETDEYKLGKGKKPDFEKPWPSFVLDIRHIQDELLIAHYSKDNLPKQAKRYVRDSKGGKILTQGDTARASLHNETYYGAIEVDGDVKYVVRKSLDSLDEKDIKNIVDAEVRSKVEKAVQSSGSLKKAVEKTIWMNEEKQIPINKVRVFAGSVTRPIHIRQQRDQSKHEYKRQYHVQNDRNYMMAIYVGQDKKGKEKREFELVNNITAVNFYRRSNDKVPTDNQLVPQFSKSGYELRYKLKIGTMVLLYENSPEEIWDLDRANLQKRLYKVTGLSSMVIQGKYEFGTIEMIHHQNAKPSTEIKKVNGEFKHDEEFRPGIKMLHSQIKALVQGVDFEINDLGEIRRLI

SEQ ID NO: 63 - protein, 1489 aa, Unknown
  OMNI nuclease sequence
MATRKILGLDLGTNSIGWAVVSQNMDSRSIAAAGSRIIPMDAALMGDFESGNSVSQTANRTAARGTRRLYERRALRRERLCRVLSILGFLPPHYTQELNRYGKLNKGAEPKLAWTVEGIKPTFLFQPSFEEMMRDFAVAQPQLAANGKKIPYDWTIYYLRKKALTQPVTKQELAWILLQFNQKRGYNQARGEEEETKTNEKKELITAKVVEVRDTGEVSKGRTWYEVVLETGDIYKRQSAYPLDWVGKTKDFIVTTKLNEDGSEAIDKEGRPKRSFSAPQEDDWGLRKIKTEHDIAQSGKTVGEFIYDALLHNPDQKIVGQLVRVVDRKLYKEELRRILDTQKQFIPELQDPDLYRQCIEAIYPQNEAYRNSIANKDFTYLLLQDVLFYQRPLKSKKSLINECPYEYHVYQTKNGDWKRQYLKCISKSHPLYEEFRLWQFAENLHIYKIDANGIGKSDCTADYIQDKAALVKWLLTQKEITEKSILSKFAGKKAKDLSWNYVSDKKYPSAPVTATLTAIIAEVGGTINNEELHHIWHILYSVSDKEQLTQALAHYAEKHNLSSVFVEKLSKQKPFAADYGAYSEKAVRRLLSLMRCGEYWNEENIDPQTKQRIEHILTGEVNDAISDRVREKLKDLNNISDFQGLPLWLAEYVVYDVRKNDTKWETPEDIDKYLQSFRLHSLNNPIVEQVVMETLRTVRDIWKQEGHIDEIHIEMGRELKQNAEQRKNTLTRQQDNEKANLRAKLLLQEFMNPDAGMDGVRAYSPSQLELFRIYEDGVLNNSNATRDDDIQRIIKDLSELKQPSAADVRKYRLWLDQKYISPYTGQPIPLAKLFTSAYQIEHVIPQSRFFDDSMSNKVICEAEVNARKDRMLAHEFITKCGGEKITLSGGRVVTVLTTQAYEDLVRDTYKTNPRKQEKLMLDDIPEKFIARQMNDSRYISRLMLGLLSNIVREKNAKGEYEPESTSKNVIACNGSTTTRLKKDWGINDVWNRIILPRFERLNQLQNTTIFTTKTANGHTIPNMPLELSKNFEKKRIDHRHHAMDAIVIAFTTRNHVNLLSNEAALEKDENARYDLQMQLRKRETWTSPNGKSHTKFTDFIAPYEGFQQDVQTTLENIIVSFKQNLRIINKSNNHTVHFEDGKKKSVKQTKGDNWAIRKSLHKATVFGKVNLRFRKTTPLKYALTHLNDIVDKDLRLKLRELVAQGYDEKRLKKYFAENKDVWSDINLQKIEIYYYTNDTPDNYYATRTALGDWLDEKSIREKVTDTGIQKILLAHLSQCNGDPKEAFSADGIEKMNQNIAQLNGGVPHKPIYKVRKYEKADKFAVGEIGSKSKKFVEADKGTNLFFAIYATTNTDGKEVRSYATIPLKAVIDCQKRGKKEWKPLLDQWVHNNNLVPANATLKYILSPGDLVYLPQDGTATIDKTRIYKMVSSTGNQCFCVPCSMASPIINKVEFSPLNKMERAITGEMIKETCVPIRVDRLGNIISIKP

SEQ ID NO: 64 - protein, 1489 aa, Unknown
  OMNI nuclease sequence
MATRKILGLDLGTNSIGWAVVNQNMDSQSIASAGSRIIPMDAALMGDFESGNSVSQTANRTAARSTRRLFERRALRRERLNRVLSILGLLPPHYAQELNRYGQLNKGVEPKLAWIVEGTKPTFLFQSSFEEMMHDFAVAQPQWVANGKKIPYDWTIYHLRKKALTSPITKQELAWILLQFNQKRGYHQARGEEEEAKPNEKKELVTAKVLEVRDTGEVSKGRTWYEIVLETGDIYRRQSAYPLDWVGKTKDFIVTTKLNEDGLEAIDKEGRPKRSFSAPQEDDWGLRKIKTEHDIAQSGKTVGEFIYDSLLQNPDQKIIGQLVRVVDRQLYKEELRRILDAQKQFIPELQDPDLYRQCIEALYPQNEAYRNSIANKDFTYLLLQDIIFFQRPLKSKKSLINECPYEYHVYKAKNGDWKRQYLKCISKSHPLYEEFRLWQFVENMHIYKTDANGIGKSDCTADYIPDKAALVKWLLTQKEVTEKSLLSKFAGKKAKDLSWNYVSDKKYPAAPVTATLTAIIAEAGGTTNNEELHHIWHILYSVSDKEQLTQALMHYAEKHNLSPVFVEKLSKQKPFAADYGAYSEKAVRRLLSLMRCGEYWEETDIDPQTKQRIDHILTGEVNETISDTVREKLKDMNGMVDFQGLPLWLAEYVVYDVRKNDTKWETPEDIDRYLQSFRLHSLNNPIVEQVVMETLRTVRDIWKQEGHIDEIHIEMGRELKQNAEQRKQTLSRQSDNEKANLRARLLLQEFMNPDMNIEGIRACSPSQLEIFRIYEDGVLNNPDIDKDDDIQRIIKELSELKQPSASDVKKYRLWLEQKYISPYTGQPIPLAKLFTPAYQIEHVIPQSRFFDDSMSNKVICEAEVNARKDRMLAHEFITKCGGEKITLSGGKVVTVLTTQAYEDLVRDTYKSNPRKQEKLMLDDIPEKFIARQMNDSRYISRLMLGLLSNIVREKNAKGEYEPESTSKNVIACNGSTTTRLKKDWGINDVWNHIILPRFERLNQIQNTTIFTTTTANGHTIPNMPLELSKNFEKKRIDHRHHAMDAIVIAFTTRNHVNLLSNEAALEKDEKARYDLQMQLRKRETWTSPNGKSHTKFTDFIAPYEGFQQDVQTTLENIIVSFKQNLRIINKSNNHTVHFEDGKKKSVKQKKGDNWAIRKSLHKATVFGKVNLRFRKTAPLKYALTHLNDIVDKDLRLKLRELVAQGYDEKHIKKYFAENKDVWADINPQKIEVYYYTNDTPDNYYATRTAIGDWLDEKSIWEKVTDTGIQKILLAHLSQCNGDPKEAFSADGIEKMNQNIVALNGGVPHKPIYKVRKYEKADKFAVGEIGSKSKKFVETDKGTNLFFAIYATTNADGKEVRSYATIPLKAVIDCQKRGKKEWKSLLDQWVHDNNLVPANATLKYIISPGDLVYLPKEGAATIDKTRIYKMVSSTGNQCFCVPCSMASPIINKIEFSPLNKMERALTGEMIKETCVPIRVDRLGNIISLEP

SEQ ID NO: 65 - protein, 1358 aa, Unknown
  OMNI nuclease sequence
MEESKYYLGLDMGTSSVGWAVTDAQYCILRKKGKDMWGIREFEQAESAAERRSHRINRRRRQRQVARIGLLKDYFADEIEKVDKNFYVRMENSKYFMEDKDERLQSHNGIFDDDTFKDEDYYKLYPTIFHLRAALLDMDNTGQAFDVRLVYLALLNMFKHRGHFLLNTESSESGDVQIRVQYEDLIRQVNEKYGVELAAVPAKSVIAIIGDKEIGRKLKHEKLLELFRINRKNRRVSEFLKCMSGLSSDANTILQPGVEEKIPVCFHDFSYTDQIPELMEQLGDEKYAIIEQMKAIYDYAILTGTMQGYEYLSLARVADYEKHRADLKCLKEIYRKYKSKEVYDRMFRSDQPGTYSAYVNSLKSADHKYRRNMKERKAENLYVTIKKELKDCAEGDEQVQYILDQIEKEQFLPKQLTGANGVIPNQVHRKEMARILKNAERYLPFLKEQDESGYTVSERILKIFSFQIPYYVGPLGVGSKTGWVQRKASGRILPWNLEEKIDKQATAEEFIKRLIRSCTYLAGEKVMPKASLAYEKYCVLNEINNLRIDGERIDTELKQQIFNECFMSGKRVTRKQLCKHLEMWGKIKSEDQVSGIDITINQSLSSYGKMYAIFGDQLKEDKYRDIAEDIIYWGTVFTDSKKMYREHLNRYIESGDLTESDVKRILGYKFKDWGRFSRALLELQGCDKSTGEKVSLLQAMWNNSLNFMELINSPDFTFREALEEKQVNLEKTLTDFEYEDLECYYFSAPVKRMIWQTILVVREIEKVMGQAPARVFVEMTRSDEEKGERGRKASRASQLLLAYKNIKNTQIRDWKKEISEAEGNGKLRSKKLYLYYMQMGRDMYTGKEIDLARLFDDNLYDIDHIYPRHYVKDDSIINNLVLVNKAANEHLKKDLYPIPAQIASNPEVRELWDALHRAKLITDEKYHRLTSREQFTDQQMGDFIARQLVETSQGTKGIAELLKALLPETTEIIYAKASNVAEFRHKNGFAKSRLVNEFHHAQDAYLNIVVGNVYYTKFTKNPWNFIKNDYEKDKQKYHYNMDRMFDWDVTRGSEVAWIVDRKDRRGTIDTVREMMRKNTPLMTRMSFEQHGGIANATLYSAKKVKTEGYFPLKASDARLSDITKYGGYTSATIAYYFIVRYKKGKKEIISVEGLPILFKEKVERTANGLERYCTEQLGYENVQIRCKKLRIQSLLEINGYRMYLSGKTGNQLIMRNATNLCLSDKQIRYIRKIEKFSETEVLDEVLCEAVNIQLYDALVEKHMHTIYAKRPNAVGGKLEKARKRFVELAVDDQCKVLYQMLQLTKIGLIRADLTLIGESAHTGVMLISKKLKQTDSVYLVEQSVTGLYEKKRSLSSLS

SEQ ID NO: 66 - protein, 1333 aa, Unknown
  OMNI nuclease sequence
MEKFYLGMDIGTNSVGMACTDENYRLLRACGKDCWAVRLFDESQTAAERRVSRTARRRLARRKQRLGFLQTLFAPYIADKTFFIRLNNSQFLSEDKDERLKKDINTLFADDGFTDKDYHKKYPTIYHLRKALMTEDISDMRLYYLALHHIVKYRGHFLFEGSMADIRDMTKLIFDLNAACADVFFEDAPSFNVSVCGQAKALLMSVERNKNAKLEDIFGLHDKRAKEIIKGICGYSVKPSTLFSERYKEEKSFSFKDLTDETFDGMQAVYGDDFALLTAIRAIYNYITFEKILEGQADISSAMVNIYEKHKRDLKKLKDFLLENATREEYNRFFKSVEEGANYVNYIGYTKKGGDKKKVKHCKDEEFFAYVKKFILSLKGVKDEIAAAEFISEAENGALLPKILHADNGLFPHQINEDELNKIVANMVRNCPETDEISEKIAPVFLFRIPYYVGPLTGKNSWAVREKDKITPWNFNQVVDLAKSNEAFMRQMTNKCSILHGEDVLPKASIYYQRYNVLNQINKLKKNDVPIDVETKQKIFNELFLTRRKVTDNAIKDVLVRSGLISEAEKKQVTISGKDGELSASMSSYIQLKTILGDFVDQDLLCGGEVCEKIILWHTLNTDKNIVVELINKNYGHIPQIKSNIKALKGLVFKDFGRLSKKLLTGLCFTDNQTGQVYSVLDLLYETNKNLNEILFDKDYGFEDMIREENGENDTKVDYEDVAKLYVSPSVRRGIWQSLKMADEYVERIGKAPDKIFIEVTREEGKKGDAGRTVSRQKQLLEKYKGIEGISELDAELKEKTDLQLRQERLYLYFRQLGKCMYSGERIDLELLNTNRYDVDHILPRTYVKDDSLDNKVLVLRVKNAQKSDQYPIPFSLVTDEARNHWAVLRAKGLISETTLNRLTRTEPLTENDFNDFINRQKTITDQTVKAVAELLSRKYPTAKIVYSKAKNVSDFRQKFDLFKCRETNDLHHARDAYLNVVVGNVFDTCFSTPFATYYKDGDKWREYNLKTMFARNVKGAWVQDNAQSISIVKRTVQKTSMAVTRYAYRNKGGFYDQTVYGKHDASITAPRKENGPLADHTKYGGYKSQKTAYFAIVQSNDKKGRTIKTIEAVPIMIDYQSVNNPDRLSGYFATYLNEPTVIVPKIKVKQLIKFNGTLCFMAGITGSSIILHNAVELFTDNKTDEYLKEVVKLVNSAKSGSIDTTLAEYVMKTNKDGVIKLVIDSERNVSVFNLLIDKLRSSRYTGVGAAITFCKTLIAGAENFKALKTFDQAVVLLQILRFFKCNAELSDLSLIGGPRFIGVLRVNKNITEIDFRIVHQSPCGLFECEQKV

SEQ ID NO: 67 - protein, 1395 aa, Unknown
  OMNI nuclease sequence
MEKNYFVGLDMGTSSVGWAVTDENYNLIRKKGKDLWGIREFEPANTAQERRANRISRRRRQRELIRLGLVKDYFADAIATVDSSFYQRLENSKYYLEDKDEDVRTSNGIFNDKEYKDKDYYKEYPTIYHLRKELIENKNKPYDVRLVYLAISNLFKRRGHFLNNSLNVDNGKFDVNIKEAYEELLNSISRAFSDDESESLTMPVINEDCVYKELEKILGNRDYSRKYKAEKIRDLLNIDKKAKKQNEVINGIVGLKIDCCKAFGITDSEEKIEAKFSEFGYSEKEPGILELLGDVLGEVLVNIKRIYDAGTLTELLKGYNYLSFARCSDYEKHKEDLRLLKMLVKKYQPEQFDSMFRDTHDGSYSAYVNSSNSEKYNYSENGIKKPNRRNMDKRSKADFYSTVKKMLSPFANEDERVQTILDEMENGTFMPKQLNGDNGVIPNQLHAIELKVILQNASEYLPFLNEIDGSGLSVAERIYKLFTFTLPYYIGPTTEKSKTGWVVRNKGYENTHVLPWNMNDVIDQEKTHKEFIERMVRRCTYMNNEQVLPKNSLLYEKFCVLNEINNIRIDNVRIDNNLKKTIYNELYKKGKKPTLKKLHDCLILNGISESAQITGIDREINNSLASYGKFAPIMGELLDTDDGRKVVEDIIYTFTIFGDDRKYLKEYLLNTYPENEYPYMTLSNIKRILGFKFSDWGRFSKELLMLEGYNRETGEIYTLLDALWEENYNFMELINSPVFSFKESMDKLEKNTLSSLAELDVEVLDRYYFSAPVKRMILQTNGVLKEIVKVMGGAPRKIFIEMTRSDEQKGDAGRTSSRKKQLLDLYKNVKQEVADRKYWSDLIEHESETGRIKSKKMYLYIKQMGCDMYTGEPIDLDELFTNRYDIDHIYPRHYVTDNNIENNLVLTNKASNEHIKKDYYPIPEKIRNNPATIELWDRLHANGMINDIKYARLRCKEEFSDEQKANFIARQLVETSQGTKGISDLLRQMLPTSELVFVKANNVSRFRQNKGRRHKNGDNSPVEGFSKSRLINDFHHANDAYLNIVVGNVYHTKFTSNPLNYIKKDYRQNKENFEYNLGRMFETKVVRNGYVAWIPEGNKENLEPTINTVNKVMSRNTPLYTRKAFVKPGIVNKVTIYGKRKATPERYMPLKSGDPKIADVTKYGGMTSISICYYFLVEHEVKGKRIRTIEGLPGYMHTRVENNPDELEKYCRDVLKLVNFSIRYRKIRIQSLLKVNGYRANLSGKTGDALILRNAEPLYLPDRYQDYIAYLEKHSEEEYHDKLDKEVNIQIYDILMEKFKDGIYRNRAKTVGNIMSNGRGQFIELSVEKQYFVINEILKLTTIGTLTAALGDIGGRSNNGKFTVGKKISDLDSCQLINTSYTGIFNSAPIDLKTV

SEQ ID NO: 68 - protein, 1357 aa, Unknown
  OMNI nuclease sequence
MNNKEYFLGLDIGTGSVGWAVTDTQYNLIKINRKYAWGAVLFDTAKGAEERRVNRCARRRYQREKQRINLLQELFEEEIYKVDSGFFHRLNESRYVYADKRDEKGEKPELPYSLFVDENYTDVDYHREFPTVYHLRKALMTEDRAFDVRLLYLAIAHIIRNRGHFLSNMGMDEVNLDFSKIFGDLMNCWKENMEDESRNSVLELENETIENIEKIMKNSELTKTAKKQKILEELSGFSKEFKELIALITGGKVSLAKLFDKKEYDTLEIDKICFDEASFEENEEIYATNLDDYFEIITKAKAVYDWMILSNIFKDDKSGYLSCAKVADYEKHKRDLKNLKEAIRNDSIGDEEDKRNLYKQTFGVPKKGEENYSKYIGMTASKGSKFVIDGAKCSKYDFYKFVKKNIIPKLKDGELKEYIEKEISLESFMPKTRVKENAIIPYQIHAKELKKILECAEAYMPFLKERDDSGKTVSEKIMMLLTFRVPYYVGPLNTASSQAWVKRNGTGRVTPWNFETMINVDLSAEKFIERMTSKCTYLKNEKVLPKSSLVYEEYMVLNELNKLQIKSEPISVELKNDIYHDLFERKLKVTLKKLVDYLKREKGYTDITKEDISGIDIDFKSSLKSYHAFKREFTDVNLSESEKEDIIKDMTLFGAEPKLLKKRLYAKFPDYESQLNSLIKSLNCNGWGRLSYKLLNGIAVEIPGQGMVGTVLYQLRNTNNNLMEILEKSGSPYAKLIEEENKTDDSHKINYELVKELYVSPATKRQIWKAIQVVEEISHAMGHPPKRLFVEMAREHMESKRSITRKNKLLDLYKSIKNEKELYEELKGQPEDKLRSDKLYLYYTQFGTCAYTGKKIELSELFNNNLYDIDHIYPQSKTADDSLDNRVLVCKDSNGYKSDVYPIDSDIQKKMWNIWYLWYSKGLISKEKYKRLTRTSELTNDELTGFINRQLVETRQSTKEIMKLMRQLLPDTELVYSKAGNVSRFRQKYKILKVRELNDYHHARDAYLNIVVGNAYHLRFTKDIRNYFMKYGTYRTYNLKKMFEKDITFQEEVAWRAGERGTIQTVLRFMNCDKVLVTRQTFERKGALFDVQPKKKGEGQVPIKSGINNERLAVIEKYGGYNGATISYFTLIEGLKNNKNKKRYIIPVPLYLCHKIEKDELYAKQFFEKESKLSNIRIIRKILIQTLMIDEGFKMRLAGKSGTQLIFHNSNELSLNKKHFKCLKEIEKFILDRKDKPDATINEKSELAGNQMLDIYNIFIDKLMNSVYSKELGKHGEFLNNGLEQFNKLSLEDQAIQLHELLKFFQCTPEMPDLSRVGGSKSIGAIRSSMDVTKRSKLAIIHQSVTGIYEKIERINE

SEQ ID NO: 69 - protein, 1355 aa, Unknown
  OMNI nuclease sequence
MKEREYFLGLDMGTGSVGWAVTDTEYNLIKINRKRAWGSVLFETSKGAKERRVNRCARRRLKRQKERLNLLRELFEEEVQKVDSGFFLRMKESRYVYDDKRDENGVKPQLPYSLFVDENYTDVDYHRDFPTIYHLRKALMEEDRKFDVRLLYLAIAHILKNRGHFLANMGSDEVNLDLKESFKALLDKWNEMMTDDEIMSVTAGSEQLEQIEKTLKDTRIVKSSKKQEIINIVGTSDKRFKELASLIAGGKVSLSKLFDRKDYESLEINKISFDDASYEENEEYYAANLEDNYDIIACAKNVYDGMILSNILKGDESGLISAAKVKDYDKHRKDLRLLKRVILEEGIGEDKQRKILYKRVFGVTKNQDNNYSRYVGVVSTKGRKGVIEDKKCTRADFYNFIKKEILPEIKEGDNKEYIKNEIEADSFMPKARVKENSVIPYQLHKKELKKILRNAEKYHPFLKETDETGKSVSEKIIMLLEFKIPYYVGPLNVSGSNAWAVRSSGKITPWNFEEKVNIEESAKNFIEKMTSKCTYLKNEDVLPMSSLTYEKFMVLNEINKIKINSEPISVELKQDIYHELFEKKLKVTVKRLIDYLKAEKGYADLKKEGISGIDIEIKSSLKSYHAFKEKFTGVNLSEKAKEDIIKDMTLFGAEPKLLKKRLTSKYPEYENQINSLIKSLKCKDWGRLSYKLLNGLAIDVPGQGMIGTVMYRLWNTNENFMQIIESSDSPYAKLIREENGEARKKGIDYSLVNDLYVSPAVKRQIWKALQVTDEIMHAMGKPPKRVFVEMAREEGEKKRSVTRKDRLIELYKSIKDEKALYDKLLKTDNDALRSDKLYLYYTQLGKCAYTGKKIEIDELMNNNKYDIDHIYPRSKTADDSLDNRVLVYKPVNGDKDDRFPLDGKIREDMRNTWLVWKQKGLISEEKYKRLTRTTELTSEELLGFVNRQLVETRQSTKAFAEALRYVIPEETEIVYSKAGNVSRFRQQYKILKVRDINDLHHAKDAYLNIVVGNVYHLRFTKDVRKYFDRNGTYRTYNLYRMFDFDVNYSFEMAWKAGKDGTIIKVKETLKCDRVLVTRQTYEAGGKLFDVQPKKKGDGQVPLKSGKNNERLNNINLYGGYNSASITYFVLIEGKDKKDKLSKYIAPVPLHLKKKLEEDENFAKKYFAEEYKLKDVKLVRKILIQTLMVTDGFKMRLAGKSGTQLIVHNAIQLIVNEKYYKPFKEISKFMQDQKQKKGISINQNSGITDEALVDIYYMLKEKLECSIYKGLPDNFKNIMEKGIDKFKELSIDEKAVQIYELLKLFECTSEMPDLSRIGGGKTSGAIRISMNVTERKHLSIIHQSVTGIFEVIERIN

SEQ ID NO: 70 - protein, 1387 aa, Unknown
  OMNI nuclease sequence
MEKNYYIGLDIGTNSVGWAVTDEKYSVVKKKGKRLWGVRLFDTAATAKKRRLKRTARRRYLRRRQRIDLLQELFAPLILERDENFFRRLDESFFFEEDKKVDGKYSLFSDKNYTDKDFYKEYKTAYHLRNRLIKGDIPDDPRIVYLACHHIIKKRGHFLFNGEINGNNISCDNEIRGLQKFVTDGNDHDVPMFGGDNFKDFSLDEFVKIITLTDTRRESIEKTTELFGVSDGKYLKNAVRVMFGYKQKVKTLFASEYYGDCDIEIDFTSEQYEETSEALKIELGDDYSYVDTLKNLYDFVVLKRLLQEHSSISEAMVSKYERHAVELRMLKNIVRKYGKTSDYNEIFKETVSDASYAKYIGMNKKGGVKQVTERESAYSYETFYKALLGKLDSIVTDKSDADYLCIKNRIENKDFLIRYASSVNASIPNQLHRDELNRILDNASVKFPYLLEKDGDGLSVKDKIMSIMTYKIPYYVGPIPNDENSEAIGKYSWLVRKESGKVLPWNFEKKVDMNASMEKFIKSLINRCSYLNTENVLPKQSLIYQEYEVLNELNGIKFNGKRIDNETKLKIFEGLFKNSGKKKITEKILKAFLVNENVVSKSDINALKIDGYQKDKEFSTCLSSYVNIVKALGNDFDRGYVDNNIDTFERIIELSTVYADNKSLFVEKLKQEFPALDERVIAKVKGLTFTKWGRLSKRLLVGVVASNTATGEVSNILSLMRNTNANFMEIIFDKEWNFNALIEEENKSVSRQIDKIKYSDIAELYCSPSVKRAIWQSIKIVREIVEIMGYPPTKFFVEVTRSDEDKKRTSSRKSVLQKLYKGVDDSGDIKAIKEALEKENENSLKDERLYLYYSQQGKCMYTGKPINIDDLLNTKLYDIDHIYPQSMTTDESVHRNKVLVCRSANKDKSDVYPLNIEVQNKMAGFWKSLRDKEFITPEKYIRLTRKEPLTDKELGDFIARQLVFTSQSVKEVINLLKIEYPNSETCYVKAEVVKDFRSRNNYLKIRTLNDLHHAKDAYLNVVAGNILSTANKNNFRMQRINKGNEIDTDIIKNYSISNIFSRGYVVSTAKNLAWNCDLFDNVEKQYYRNDILVTKMQTVGKGAFYDETVRKSLANAKYAKAARKASIPLKKVEGNRYSIERYGGVTTVSPRWFALIGCSDKKNNQIYRIEPINIYDYAKMDKSRIKDEMASLLERQGHKNVDIIAILKKNTLLSIDGNRYYLTGTSGESLTLDNAKQLTVGREYELAVNRILKYTENPKRNKDVTEVAIRSKSKEDYNIDEKAVFVMLVDKLKTEFPQFRVVASKFDDESIEAFDTASKSRQCEIITNIIKMTGCNSTRGKLDGEPFNANFKASEGALTANKKVSYELTVIDQSVTGVYEYSKSIKK

SEQ ID NO: 71 - protein, 1387 aa, Unknown
  OMNI nuclease sequence
MEKNYYIGLDIGTNSVGWAVTDEKYSVVKKKGKRLWGVRLFDTAATAKKRRLKRTARRRYLRRRQRIDLLQELFAPLILERDENFFRRLDESFFFEEDKKVDGKYSLFSDKNYTDKDFYKEYKTAYHLRNRLIKGDIPDDPRIVYLACHHIIKKRGHFLFNGEINGNNISCVNEIRGLQKFVTDGNDHDVPMFGGDNFKDFSLDEFVKIITLTDTRRESIEKTTELFGVSDGKYLKNAVRVMFGYKQKVKTLFASEYYGDCDIEIDFTSEQYEETSEALKIELGDDYSYVDTLKNLYDFVVLKRLLKEHSSISEAMVSKYERHAVELRMLKNIVRKYGKTSDYNEIFKETVSDASYAKYIGMNKKGGVKQVTERESAYSYETFYKALLGKLDSIVTDKSDADYLCIKNRIENKDFLIRYASSVNASIPNQLHRDELNRILDNASVKFPYLLEKDGDGLSVKDKIMSIMTYKIPYYVGPIPNDENSEAIGKYSWLVRKESGKVLPWNFEKKVDMNASMEKFIKSLINRCSYLNTENVLPKQSLIYQEYEVLNELNGIKFNGKRIDNETKLKIFEGLFKNSGKKKITEKILKAFLVNENVVSKSDINALKIDGYQKDKEFSTCLSSYVNIVKALGNDFDRGYVDNNIDTFERIIELSTVYADNKSLFVEKLKQEFPALDERVIAKVKGLTFTKWGRLSKRLLVGVVASNTATGEVSNILSLMRNTNANFMEIIFDKEWNFNALIEEENKSVSRQIDKIKYSDIAELYCSPSVKRAIWQSIKIVREIVEIMGYPPTKFFVEVTRSDEDKKRTSSRKSVLQKLYKGVDDSGDIKAIKEALEKENENSLKDERLYLYYSQQGKCMYTGKPINIDDLLNTKLYDIDHIYPQSMTTDESVHRNKVLVCRSANKDKSDVYPLNIEVQNKMAGFWKSLRDKEFITPEKYIRLTRKEPLTDKELGDFIARQLVFTSQSVKEVINLLKIEYPNSETCYVKAEVVKDFRSRNNYLKIRTLNDLHHAKDAYLNVVAGNILSTANKNNFRMQRINKGNEIDTDIIKNYSISNIFSRGYVVSTAKNLAWNCDLFDNVEKQYYRNDILVTKMQTVGKGAFYDETVRKSLANAKYAKAARKASIPLKKVEGNRYSIERYGGVTTVSPRWFALIGCSDKKNNQIYRIEPITIYDYAKMDKSRIKDEMASLLERQGHKNVDIIAILKKNTLLSIDGNRYYLTGTSGESLTLDNAKQLTVGREYELAVNRILKYTENPKRNKDVTEVAIRSKSKEDYNIDEKAVFVMLVDKLKTEFPQFRVVASKFDDESIKAFDTASKSRQCEIITNIINMMGCNSTRGKLDGEPFNANFKASEGALTANKKVSYELTVIDQSVTGVYEYSKSIKK

SEQ ID NO: 72 - protein, 1387 aa, Unknown
  OMNI nuclease sequence
MEKNYYIGLDIGTNSVGWAVTDEKYSVVKKKGKRLWGVRLFDTAATAKKRRLKRTARRRYLRRRQRIDLLQELFAPLILERDENFFRRLDESFFFEEDKKVDGKYSLFSDKNYTDKDFYKEYKTAYHLRNRLIKGDIPDDPRIVYLACHHIIKKRGHFLFNGEINGNNISCDNEIRGLQKFVTDGNDHDVPMFGGDNFKDFSLDEFVKIITLTDTRRESIEKTTELFGVSDGKYLKNAVRVMFGYKQKVKTLFASEYYGDCDIEIDFTSEQYEETSEALKIELGDDYSYVDTLKNLYDFVVLKRLLQEHSSISEAMVSKYERHAVELRMLKNIVRKYGKTSDYNEIFKETVSDASYAKYIGMNKKGGVKQVTERESAYSYETFYKALLGKLDSIVTDKSDADYLCIKNRIENKDFLIRYASSVNASIPNQLHRDELNRILDNASVKFPYLLEKDGDGLSVKDKIMSIMTYKIPYYVGPIPNDENSEAIGKYSWLVRKESGKVLPWNFEKKVDMNASMEKFIKSLINRCSYLNTENVLPKQSLIYQEYEVLNELNGIKFNGKRIDNETKLKIFEGLFKNSGKKKITEKILKAFLVNENVVSKSDINALKIDGYQKDKEFSTCLSSYVNIVKALGNDFDRGYVDNNIDTFERIIELSTVYADNKSLFVEKLKQEFPALDERVIAKVKGLTFTKWGRLSKRLLEGVVASNTATGEVSNILSLMRNTNANFMEIIFDKEWNFNALIEEENKSVSRQIDKIKYSDIAELYCSPSVKRAIWQSIKIVREIVEIMGYPPTKFFVEVTRSDEDKKRTSSRKSVLQKLYKGVDDSGDIKAIKEALEKENENSLKDERLYLYYSQQGKCMYTGKPINIDDLLNTKLYDIDHIYPQSMTTDESVHRNKVLVCRSANKDKSDVYPLNIEVQNKMAGFWKSLRDKEFITPEKYIRLTRKEPLTDKELGDFIARQLVFTSQSVKEVINLLKIEYPNSETCYVKAEVVKDFRSRNNYLKIRTLNDLHHAKDAYLNVVAGNILSTANKNNFRMQRINKGNEIDTDIIKNYSISNIFSRGYVVSTAKNLAWNCDLFDNVEKQYYRNDILVTKMQTVGKGAFYDETVRKSLANAKYAKAARKASIPLKKVEGNRYSIERYGGVTTVSPRWFALIGCSDKKNNQIYRIEPINIYDYAKMDKSRIKDEMASLLERQGHKNVDIIAILKKNTLLSIDGNRYYLTGTSGESLTLDNAKQLTVGREYELAVNRILKYTENPKRNKDVTEVAIRSKSKEDYNIDEKAVFVMLVDKLKTEFPQFRVVASKFDDESIEAFDTASKSRQCEIITNIIKMTGCNSTRGKLDGEPFNANFKASEGALTANKKVSYELTVIDQSVTGVYEYSKSIKK

SEQ ID NO: 73 - protein, 1387 aa, Unknown
  OMNI nuclease sequence
MEKNYYIGLDIGTNSVGWAVTDEKYSVVKKKGKRLWGVRLFDTAATAKKRRLKRTARRRYLRRRQRIDLLQELFAPLILERDENFFRRLDESFFFEEDKKVDGKYSLFSDKNYTDKDFYKEYKTAYHLRNRLMKGDIPDDPRIVYLACHHIIKKRGHFLFNGEINGNNISCVNEIRGLQKFVTDGNDHDVPMFGGDNFKDFSLDEFVKIITLTDTRRESIEKTTELFGVSDGKYLKNAVRVMFGYKQKVKTLFASEYYGDCDIEIDFTSEQYEETSEALKIELGDDYSYVDTLKNLYDFVVLKRLLKEHSSISEAMVSKYERHAVELRMLKNIVRKYGKTSDYNEIFKETVSDASYAKYIGMNKKGGVKQVTERESAYSYETFYKALLGKLDSIVTDKSDADYLCIKNRIENKDFLIRYASSVNASIPNQLHRDELNRILDNASVKFPYLLEKDGDGLSVKDKIMSIMTYKIPYYVGPIPNDENSEAIGKYSWLVRKESGKVLPWNFEKKVDMKASMEKFIKSLINRCSYLNTENVLPKQSLIYQEYEVLNELNGIKFNGKRIDNETKLKIFEGLFKNSGKKKITEKILKAFLVNENVVSKSDINALKIDGYQKDKEFSTCLSSYVNIVKALGNDFDRGYVDNNIDTFERIIELSTVYADNKSLFVEKLKQEFPALDERVIAKVKGLTFTKWGRLSKRLLVGVVASNTATGEVSNILSLMRNTNANFMEIIFDKEWNFNALIEEENKSVSRQIDKIKYSDIAELYCSPSVKRAIWQSIKIVREIVEIMGYPPTKFFVEVTRSDEDKKRTSSRKSVLQKLYKGVDDSGDIKAIKEALEKENENSLKDERLYLYYSQQGKCMYTGKPINIDDLLNTKLYDIDHIYPQSMTTDESVHRNKVLVCRSANKDKSDVYPLNIEVQNKMAGFWKSLRDKEFITPEKYIRLTRKEPLTDKELGDFIARQLVFTSQSVKEVINLLKIEYPNSETCYVKAEVVKDFRSRNNYLKIRTLNDLHHAKDAYLNVVAGNILSTANKNNFRMQRINKGNENDTDIIKNYSISNIFSRGYVVSTAKNLAWNCDLFDNVEKQYYRNDILVTKMQTVGKGAFYDETVRKSLANAKYAKAARKASIPLKKVEGNRYSIERYGGVTTVSPRWFALIGCSDKKNNQIYRIEPITIYDYAKMDKSRIKDEMASLLERQGHKNVDIIAILKKNTLLSIDGNRYYLTGTSGESLTLDNAKQLTVGREYELAVNRILKYTENPKRNKDVTEVAIRSKSKEDYNIDEKAVFVMLVDKLKTEFPQFRVVASKFDDESIKAFDTASKSRQCEIITNIINMMGCNSTRGKLDGEPFNANFKASEGALTANKKVSYELTVIDQSVTGVYEYSKSIKK

SEQ ID NO: 74 - protein, 1378 aa, Unknown
  OMNI nuclease sequence
MDNKKIFLGLDIGTNSVGWAVTDDEYRLRKFKNDLMWGVHLFDEAQQSADRRAFRTARRRLDRRKQRIALLQEFFAPEIIKKDPTFFIRLKESALLPQDREHRNSSIFFNDDNYTDKEYFSQFPTIHHLITELMKNDNPHDVRLVYLACSYILAHRGHFLFEVEKDDIESIKKFAPIYAEFIDTLNNICDSIPFDDNISELEEILRLRCTVSEKEKRLTALWFAGKKPSRDLCEGLRFDLLIKLLSGGKTKLEELFINDEYKDLEVSSVCAASADFGDILDSLAGVVTPEQFSLLSAVKKLNDWSLLVNILKNSDSISHSKIKEYEAHKKDLEMLKGICRKYLNKTEYNSIFRDKEEKNKSYNSYINSPKNCSQEDFCKFVRTFIDKIKCEENDKQTLEYLKQKCADKTLCPKQVNTNNRVIPYQLYYHELKCILDNACIYLDFLNERDKYGTVADKILSIMEFRIPYYVGPLVNHSDNPNAWMIRKSEGIIRPWNFDEMVDLDKSEVEFIKRMTCRCTYLAGEDVLAKNSLLYCKYTVLNEINNITVDGKKISVAAKQKIYNEQFMKKRRVTVKMIGNLLHSCGEMTSEQKLGGIDLTIRSSLKSYHDFKSMLERKVLCESDVEKIIERITVTTDITRLKSWLKQEYPSISAEDVKYISKLNYKDYGRLSRRLLENVYETDTNTGEVVNEGNIITRLWETNDNLMQLLSSKYKYMERIKALNKEYYSDPKHSLTISDRLKEMYVPTAVRRSINRTLDVVNEIKSIAGKDPDKIFIEMARENDMTKKGVRTKSRREQIKTLFEDAKKLSDMSAEIAHLEEKLSETDDGKLRSEKYYLYFTQLGRCMYTGHPIDFEKLGGDTYYNIDHIFPQAKIKDDSLENKVLVESEANGTKSDTYPIDKDIRDKMRGFWKSLHEKKLIGDKKLQRLIRSTPFSEDELAGFISRQLVETRQSTKAAAELLKELCPESEIVYVKAELASDFRHETDMLKCREINDLHHAKDAYLNIVMGNVYNAKFTKDPLNFIRSGEHYSLKMFKKNADGKTSGLLTHKVERNGTTVWDPAKSFDTVRKMMSKNSVRYVRYTYKRKGGLFNQMPESKKPGLIQRKKGLKTEKYGGYNNASVSTFGIIKCKNDIVIIPIEIMKEYKFFSDNIFAKQYALEKLENIYPQKKYQSLTCEDIIVPCIHYQDGSKRLPILKINSLLEVNGFRINLCSKDSGGKYMIVSGAESLICSYQDEKYIKSVCSYAAKTIDEKSLQYNGISYERNLDIYDLICQKCANGHFSKWKKFRDTSIVLNKKRDIFISLSLNEQICALKEIVNILKSGRSVYCDLSAIEESKQSCISKLGAVLTSIKSVSDIRIIDQSPTGLYEKKSVNLLEL

SEQ ID NO: 75 - protein, 1427 aa, Unknown
  OMNI nuclease sequence
MVKKYLLGLDLGTNSVGWCVTDENNKIVKKGGKSLWGARLFEEAQDASSRRANRIARRRTQRRAERIDLLQMLFKEEIDKIDSTFFLRLNQSMYHKEDKDDSISNFDNLLFVDDSFNDFHYYKKFPTIYHLRKYLYDTNEKADIRLLYLALAHMVKYRGNFLIEGEFKANDSGQITLLFKNLKSVLLELPDENSCSIELKENFADEFNAKVLKAKGVSAKKEALETMFGKDKYLKIVIFPLIAGSEVDTAKIFSDYEGDIDPDKISFSKADYDDKYAKLSEFFPNDLRIEMISILKGIYDYVLLGKLLGDKSTISEAMIERYDTHKADLKKLKAYIKANIPEKYNEVFRLHGGDKEINNYVNYVGSTNSNLGKLRCKHCDQDGFYKYIKKILKIDDTKFEEIQDDFLKDIYTKIADKSYLPRQNSTDNGVFPYQLNLTEMKKILEIQKSYYPFLEKKDDDGISTIEKIESLLTFKIPYYVGPLMPVIDGNPRSSHSWMVRKDDKTKIYPWNFKQIVDEDQSAEKFIKRMLNKCTYLPDCYCLPLNSLLFQRYRVLEVLNKLLINGMPLTKVLKEELINEVFKKNKTVTKKKIEDYLTNKYEKPNSITTSNEKEVKQIDASLSSYVFFSNVLGEEYVKNNESQIEQIIKDLTIFEDKKIIERRLSKYHFTEKQINEIKSKKMTGWGRLSKEFLTMTTRLFNEATGEYIDKSLIEVMNDTNFNLMELINDTNYDFKRKIEEANFKDRVTYKDHKEKHEAIVKYVDECYVSPGMKRPLIQAMSIIEDVEKILGSPIDEYYVECTRTNKAEKKVKDSRQKHLQELYEQAKKLAKAEIKNSADKERVLSEIDYFSNKVKNENELSKFRSDKYYLYLLQLGKCMYTLKPISLADINDNSKYDVDHIIPQAMLKDDSIENRVLVCSEANRYKKAIYPVSEELISPGAKAFYKNLYKLGLMGEKKYNNLIRTKPLSDSDLIGFVNRQLVYTNQAVKALVDTIKRFQVNKDGNPPKVIYSKGENVSDFRKDFDIVKCRDANSFHHAHDAYLNICVGRAINTYYGDFNYFKYQEFKENKRSFNPKKIFCNNERDGSKSPLLDSDGNVVWDYKTSISEIKKNIFTRFDVLTTTMQYIKGGQLTNATINPKGDNLVPVKENGPLSNTKKYGGKSGVTYSIYSLVEFIDGKKKKRLIAPIPLSQIKGKYLTDNIIDYLSSKYGYKDIKVLIPCLRINSVLRNKSSRVCLSGVCDEMKSYYVKNLSEIHYSETELRTIKKIRKMLDIISRKKLDMSKEDFIEKVSKLMIFSTDSIIISPAANERTKAVVLTNGQLDDLYNKFVTMNKKHISLFKSSFAIIDLLTKEETKAKFNFLNIFEKSKIVMELVLYFNSSIQGANLSLIGGPSKAGKARISSNIPSGIDIIAESPTGFFTKTLWKAS

SEQ ID NO: 76 - protein, 1373 aa, Unknown
  OMNI nuclease sequence
MRGALLMGKNYIGIDIGTNSVGIAQTDENYRVLKFRGNAMWTSAVFESAAQSAECRGFRVARRRLDRRQQRRDLLIELMAPAIVDIDPVFFKRIRESALWADDKTTGSRYTYFSDEGYTDKQFHRDYPTIHHLICELMNDPSPHDPRLVFIACSYILTHRGHFLNDADKEKISDVLDIGKVFKGFSDWFRDNDSAFPFGDSADEFGRILINEKSIRNRPGVFYSVYFGGKKPKPAIDDVIDVNELIKLVSGGVIELSKLFMNEEYQELENNKIRLSDAAFDEKATGLREGLGDDFGLIAAAKNIYDWSLLTGVLGNSGSLSEAKVRVYEKHGSDLAALRRVVRHYCPDQYKSIFKTCEKGNYTSYSGNVKSVKDITKFERCNQEEFCDHLKSLLKSVKPEPGDSECERVLKEIAEHTLCPRQVNSDNRVIPYQLYYTELKKILENAANYIPQLNATDEYGSIASKILRLMTFRVPYYVGPLVKKKEKNNAWIVRRGEGRILPWNFDDLVDRDRCEDEFIKRMTCKCTYVAGEDVLPKNSLLYSKFMVLNEINNIRIDGKRENFPVEAKQKVYTELFEKRKRVSVRDIKNLLVSEGYMKPESQIEGLDITVKSSLKSWNGFKKLLASGMLSEAEVEEIIERMACTTDISRFRAWLEKFGLTAADIRYISGLKYADFGRLSRTFLTEIPDIDPTTGEELHPNIITMMWETNNNLMELLSKNYNYSSQIESMNQEYYSQHPLKLDERLSEMHIPSAVRRPVKRAVEMVREYSRAVHKAPDRIFIEMSRDLTDPQTKGKRTQSRRDFILEYYNKLNEDTTALRALLENKSDGDLRSEKLYLYFIQLGRCMYSGQSIDIEQLAGETYNVDHIFPRCMVKDDSIENKVLVLSTLNAAKGDNYPIAPGIQRDRYGLWKKLKDIGLMGETKYRRLTRTTPFSDDELAGFISRQMVETRQSTKAVAALLKEEFPESEIVYVKAGLASEFRDQYGLPKCRELNDLHHAKDAYLNIVMGNIYHVKFTSNPLNFVKEFRSKKEVFNLKLETMLSHDVIRNGETAWIGDGSWLEAVKKQMNKNNIRYVRYSFRRKGQLFAQQPLKKGCGQVPRKKDLPIERYGGYNGTTASFFSLVKYHSEKTSGVVIIPVELMYSQRFEHDTAFAEEYAVKMLGNIVSLKSGDSIKSVDFPLGSRILKVNTLLEIDGFRVNLTNKATGGRQLGITSAMPLLADNHDTIYIKRIHTIYGRIMECEKNKSTYNVRPQYDMITRERNIEIYDMLSQKACITPFNVIFSYASKIFCDGRDTFVELGVNDQIKVLVNMISVFMTGRSSTCDFEKINGKKRSLEMRLNSNLSNAKGYKSIRIIDQSAAGLYEKASPNLLTL

SEQ ID NO: 77 - protein, 1351 aa, Unknown
  OMNI nuclease sequence
MEKFYLGLDIGTESVGIACTDENYRLLRAKRRDLWAVRLFDEAQPAVNRRTKRAARRRLMRRERRIDLLQEIFAPYIGDDTFFLRLNNSPLWLEDKDEKLSGKYCLFADKNYTDKDFHREYQTIYHLRKELCDGKKKVDIRLFYLAIHHIIKYRGHFLYDGSLAEIRNISKLFAELNDACEEVFGDDAPSFDIEKAEEFKKKATEKKGLNDKCKEIIALFGVKDDLSKNIIKYIVGSKVAPKAVFGEQYADEKSFSFKEVSDEEFEGKREGFGDDFVLLEKMREIYNFVAFEKVLNGKECISEAMIDIYEKHRKDLKILKYFIKNEYGDEAYRTLFKDVDKGNNYANYIGMAKVNGKKVYVKKCVKYDDFKAFLKKLLATKPKSEIVDDYTYDYVMKELEEDRFLPKILNSDNGLFPNQINLAELDKILANLKKFYPETAEITEKIRSIFTFRIPYYVGPLNTYHSDKGGNSWMVRKEDGTILPWNFADKVNLAASNENFMRRMTNKCTYLSGEDVLPKFSILYQKYNVLNQINKLKINEIPLTVEQKQGLFNDKYLVDAKMSDRKIKDYFVEKGWLTAEEAKSAVISGKDGELTVSMSSYIRLKKILGELVDENLRMCEDIILWHTLNTDKSIVKSLILTKYGDIPAVRNNIGRLNGLTGLKDFGRFSEKFLTGINGGEDPVTGEIYTILSVLYDTNMNLNEIINDDKYGFKYAIKEHNLGINQTIEDEIEELYVSPAVKRGISQAMKMVDEYVSAIGRAPDKIFVEVTRADGTKGDAGRSVKRKDNLLKLYDSVKKEGIEGYEELLKELKENETDLSLRSERLYLYYMQLGRCAYSGEPIDLAYLPGDTYDVDHILPRSYTKDDSLDNKVLVKRDKNAIKGDKYPIPYTLVTDKARKLWKVWKEKGLISDKKYKLLTRTEPLGADDYNDFINRQKVFTDQTTIAVAKILEARFKASGTKIVYSKAKNVSDFKSKFNIVKCRETNDLHHARDAYLNIVVGNVYDTRFGNVRAYFYRNEDENSFREINLKYMFTTDTPNAWKTGETAYTVIETLAKPSMAITRYSYTNKGQFYDETLQKKGANCSAPLKGKGPLSNTEKYGGYTGLTTAYFVVAESDGKKGARMKTIEAIPVYKEYGIKSDEVKIKDYLENECGLKNVKLLVPKLKIKTLVKINGFNAWLAGMFNNYVIVHNANEWFTDKDTDDYVNGLGKLIETAKNGSVDENEEEYVIKTNRKKEVKQVINAENNIRLYDKIVEQTSKKIYEGISGAKIIVKTIKEGRDKFVSKSVLKQARILLQMIKYLKCNAELANIAEIGGSANSGKLYTNKDITNTNFEIVHVSPCGLKTIVVKV

SEQ ID NO: 78 - protein, 1351 aa, Unknown
  OMNI nuclease sequence
MEKFYLGLDIGTDSVGIACTDENYRLLRARRRDLWAVRLFDEAQPAVNRRTKRAARRRLMRRERRIDLLQEIFAPYIGDDTFFLRLNNSPLWLEDKDEKLSGKYCLFADKNYTDKDFHRDYPTIYHLRKELCDGKKKVDIRLFYLAIHHIIKYRGHFLYDGSLAEIRNISKLFAELNDACEEVFTEDAPSFDIEKAEEFKKIATAKKGLNDKCKEIIALFGVKDDLSKNIIKYLVGSKVAPKAVFGERYADEKSFSFKEVSDEEFEGKREVFGDDFVLLEKMREIYNFIAFEKVLNGKECISEAMIDVYNKHKKDLKLLKYFIKNEYGDEAYRTMFKDVDKVNNYANYIGMAKVNGKKVYVKKCVKYDDFKAFLKKLLATKPKSEIVDDYTYDYIMKELEDDRFLPKILNSDNGLFPNQINLAELDKILANLKKFYPETAEITEKVRSIFTFRIPYYVGPLNTYHSDKGGNSWMVRKEDGTILPWNFTDKVNLAASNENFMRRMTNKCTYLSGEDVLPKFSILYQKYNVLNQINKLKINEIPLTVEQKQGLFNDKYLVDPKMSDRKIKDYFVEKGWLTAEEAKSAVISGKDGELNVSMSSYIRLKKILGELVDENLRMCEDIILWHTLNTDKSIVKSLILTKYGDIPAVRNNIAALNGMTGLKDFGKFSEKFLTGINGGEDPVTGEIYTILSVLYDTNMNLNEIINDDRYGFKEAIKEHNLGINQTIEDEIEELYVSPAVKRGISQAMKMVDEYVSAIGRAPDKIFVEVSREDGTKGDAGRSVKRKDNLLKLYESVKKEGIEGYEELLKELKEKETDLSLRSERLYLYYMQLGRCAYSGEPIDLAYLPGDTYDVDHILPRSYTKDDSLDNKVLVKRDKNAIKGDKYPIPYALVTDKARKLWKVWKEKGLISDKKYKLLTRTEPLGADDYNDFINRQKVFTDQTTIAVAKILEARFKESGTKIVYSKAKNVSDFKSDFNIVKCRETNDLHHARDAYLNIVVGNVYDTRFGNVRAYFYRNENDNSFRENNLKYMFTTDTPNAWKTGETAYTVKETLAKPSMAVTRYSYTNKGQFYDETVQKKGANCSAPLKGKGPLSNTEKYGGYTGLTTAYFVVAESDGKKGARMKTIEAIPVYKEYGIKSDEVKIKDYLENECGLKNVKLLVPKLKIKTLVRINGFNAWIAGMTGKQILMHNANEWFTDKDTDDYVNGLGKLNEAAKNGSVDENWEEYVIKTNRKKEIKQVINAENNICLYDKIIEQTSKKIYAGISGASYYRDSLIKCRDEFAKKSTLTQAKTLLQTIKFLKCNAELSNIAEIGGSAAGGILRINKDITKINFEIVHVSPCGLKTIVVKV

SEQ ID NO: 79 - protein, 1412 aa, Unknown
  OMNI nuclease sequence
MKQRQEYYIGLDCGTSSVGWAVTDEKYDLLKTKRKVKKNDKTKSKQCTLWGVRLFDEAETAATRRIARSTRRRNARAKERLKLLRLLFRDEIAKVDPEFYNRLRESFYYEEDKNLVSKSKNTLFNDPDFTDKDYYNLYPTIWHLRQAIIKADDNVHFDIRLYFLAIQHILAHRGHFLLEGDIGKGQASFQPIFDVFYDACEDYYRLNNSAASSVERIIEDKSKSKIDKKKELKEILFIEDDGDEEALKGQTELAGLLIGSKVSLTKIFGIESDEDFKYSFAEGVFEDKIPDIEMAIGAENMDLIRAAKQVYDYAILHNLLNGREYISDAMVANYDQHKKDLSALKLAFKPLPESYNKLFKEKIYDASKTPNKDFPIYQAYIGKARSAKGKPALVGQDIFNAQLVNLMESRGITGELLDRAQKGELLPKQRGQAKGTIPQQLHHNELKIILNKLTQDYPSFGVENQSESEKYNTLAKKIASIHSFCIPYYCGPIVKQKYDEQGKLIPGGKSQFSWADEEITELVRPWNFDRLVNKDQRATNFIRRMTNECTYLLGENVLPKSSLLYQEYMLLNELNNLRINGQRIDNELKKTIFEQGYLAGELNGNITIHSLERWLKNGFIRPDDELSGASETKYLPKLQTYQDFRKILGEDFEKKYSNKQLERVIEAITILGDEKQMLTRRIRSELNCSEEVAKKLAKRSYKDWGKFSAKFLNGITVNNQTILDWLWDDNKNLMELLGQEVGFGKVVEEYNNLSGKKPEAGAKIHYSNIQDLYCSPAVKRSVWQTVKIVDELAKSQKHAPTKIFIEVTRDEDMKAKGKYTLARKKDLEAKLKSIKSEEAQEILNELSTKEDRELQSKKLFLYFSQMGKCAYSGEPINLDEINNSSLYDIDHIYPRSKTKDDSITRNLVLVKAELDREKTNIYPISGEIRGKMSRTWQLWYRFGLITKEKYERLTRATELTTDELGGFIARQIIETSQTVKAIRNLLQSAYPDTKVISVKAGQVSDFRHLFANGIKFRNSDQYKVQPRPEFIKVRELNDFHHAKDAYLNIVVGNVMSSTFTDDPYSWIKKREGKEYSVRPELLFRASEEYQKSDGRITHYPEVQNWDFANSINLVSSTMARNDILWTRMNYVESSEISDLQIVPHSDKTDGILPIKRDSRLAQINKYGGYNSIKGAFFALIECNNKKGELERRIVSIPQIYKDKVDQFVKNKYQGGKVILSPIKYKSKLKINGFPVHLAGKSSSGLVLYNGLQLLLEPDEQRYLKRVLKAISKRQQIRGGRQKDQSKDGISRENNSMIMEAICRKLALFNAMPGFGEKANTIRACAGDFSKLALDQQTDAICNMVKILRCNAETGNISSFVPKASFLGKGTMPEDITQRYENIFLISQSPAGLYEEQIDLKTIHPQNLKKKAD

SEQ ID NO: 80 - protein, 1368 aa, Unknown
  OMNI nuclease sequence
MGKFYIGLDIGTNSVGIACTDENYNLLRAKGKDLWAVRLFDEAMPASDRRMKRAARRRLMRRRQRIALLQELFALLMAKKDDTFFVRLNNSPYLIEDKRGTDSKYVIFADDDYNDADFYRDYPTIYRLRRDLIHGKTQKDIRLYYIAIHHILKYRGNFLYEGQSLSDVRDVSRLFGDLNNQFDALGNESAVYFDESKLEEFKKIATEKRGINARNKECEELFGKMSAEMKSAIKLLLGGKVVLSKIFGREPAEGEKSVTFKSLDDIAFETLMQDFSDDEAEVLISLKKIYDNLTFESVLGGYEYISDALVDMYEKHKADLKKLKDLLRGHKKLYHAMFRYVVRSDGEKENKSEDKEGKKQPANYASYVGYTKTNGKKIACKRCVKVKDFYDFVKKMLTDHRGELDNDALADEILGDIENETFMPRILNADNGTFPYQVNEQELKKILENAEKDFPEFREVSEGCTLSEKILSLLRFRIPYYVGPLNTYHEDKGGNSWMVRRAAGRITPWNFDEKVDKKKSNEKFMRRMTNKCSYLHGCDVLPKCSILYQKFIVLDQLNKLQIDGEPVSVALKQRIFDELYMTRKSVSKNNIKDYLVKIGQISEKEKKDTDVKCGADDFKASMSTYFTLKNILGDLVDKNEQLCEDIVLWHTLNTDKENVRELIEEKYGDIPEVMKNIRALKGLVFKDFGKLSREFLCELPGGVDENTGEVYTILGELYKTNKNLNELLWADEYSFRKSIDKMNGAASPDVTYEDVEELYVSPAVRRGIWQALRMCDEYVEALGRKPDKVFVEVTRYDDKEKKGKKQKSRKEELEELYKQCDGIDDLKARLGAKNDVELRQDRLYLYFRQLGKCMYSGDNIELDALMSDQYDIDHIIPQSLAKDDSWDNRVLVKSELNRRKTNDYPVPDFCRSSGAVAHWEVLKKKGLISEKKYKRLMRRTPLTNEELEAFAARQIVFTGQASKAVAELLRRKYKTDGKKVVYYSKAGNVSDFRKDHDFIKCRDTNDLHHARDAYLNIVVGNVYDARFGSLYRDLKRGKPIISNNAEKKLFTYTIPGAWDKDKSMAVVEKTLAKPSMCVTRYSYISKNVFYKINPLSAGASGISVPRKETFPLNNTEKYGGYTGLSTAYFVLILSKNMRGKEIKTIDGVPVLIEYKTKGDINKLEEYFALNDKYIEPKILLKIKKDSCLKYGKAPIILTGVADNARLSMHIAFEWFASARIDKYVKALTKCREFIDKGYFSRSAETYTVNKSSISKNGVVIDRSANIELYDIILKQLSRDEYDVGNIKSLLDNLTEQRKLFASLTCYEQIKLLIELTRILKCRSKGKPIDLSLLNIKYVAPRIKKNISNVDVFLVNDSPCGLHTVIRKL

SEQ ID NO: 81 - protein, 1421 aa, Unknown
  OMNI nuclease sequence
MDKVDKNFYLGLDIGTDSCGWALTDEDYNVVRVKGKKAWGVRLFDDAEVAKERRTKRTARRRLQRKILQAEWLREIFSNEVEKTDPKFFDRLKYSNLFREDKELMGINSKYSLFNDVLKQVYTDKEYYAKYRTVYHLREELLEKPADDIRLLYLAVHSFLTHRGHFLYETAEADKIDITAMYNDVLSKLNELEFENGQIFSLSEVEEKVFTDLLENFKEGLSLREIKENFSNNIGAKNKREKDLAKIIISGKFKLKDLFEVDKEDNIDVDFSSEKYEQETYGKISEILGDDEKLAIVDKFQNIYSSIQLKKLLGEHKYISQAMVAKYELHNKQLKEFKNFISKYYPSKKSYIFRNAGNGDKLVVNNYAHYVYQTLTGGKKQVMQKRAAKDNFYSFVKKILEQEPEIPVDQNFEEYKEYVISLMDKGEFLQKIRSHDNTVLPNSLYMSELKKILEVSFQKFDFLKTIDETGLSGKEKILQIISFRVPYFVGPIGDSKPEFSWAERKEDMSLRPWNLSKIIDLNKAEDGFIQRMTNKCTYLKDKDVLPKDSILYSKFRVLNELNNLKIDGNSISVAVKQSIFNNLFKKEKKVSTKKLLNFLAAENVISADDIKNVSITGIDKEFANNYASFVTFSNRFGEEFVEKNIDIFEKIIKYHTIISDKSRLQERIKREFDIFTDDDIKWLKSLNFSKWGRLSREFLEEILFADRRKQEDLTVKENFSDRYVEKLDNGEVYSVIEALWETNNNLQQLFDRTNYTLGDMIEQTEQKLGRDLTYLDVDEMYCSPAVKRGAWQAIKIINEIKSAIGKYPDKIFVEVTRHDSVKGEKGRKDSRKRNLEKLYNDSKLKEMCKQFSLEYNTLINELNKSDVSNLRSDKLFLYFLQLGKCMYTGEPIEIADLYDDNKYNVDHIIPQSKIKDDSLNNKVLVKMIANKEKDNYYPISDIKPEWQIRQKHFWHMLKDRGLLSAEKLSRLERTEPFNEREEIDFVNRQLVETNQESKAVIDLLRKVVDNPTDIIFSKANAVSDFRKKYEIYKSREVNSLHHAKDAYLNVVVGNVIYNRFTARFWDRRDNDKNSREHVTRNYTKLFEGNVWSCRGDNLVWNKDRDLTRVKAQCEQNNCIVSVMPYVNSNGKFYNDTVYKSKKKDPNTSASFALKGEGKLLSDIEKYGGYNSLSGAYFMVVESEGKNGKIKKTIETVPIIIEYKYRNDPDKQEKIIKYLEEQNNIKITKVIMSVLKYKSTLNIGGGLYTLTGKTNNSLMISNQIQWHINNKNTAYVKTLEKYLSMSDSTKEKLAKADDYIVVSPGIKDKTQEVRITRQENIELYDLVIRQLKKKIYNISSIKGVLNTLENSRRKFNLLNLDEQVKQLNNIIRYLGGSYSVDLILLGGVGRAGATTIGKNITDLDVKVIVQSASGLKRKEIKL

SEQ ID NO: 82 - protein, 1411 aa, Unknown
  OMNI nuclease sequence
MAKYRIGLDVGTNSIGWAVTDLNNKLIMKKGKKLLGVLMFKESSGGDKDPNKLRRTYRCSRRRIRRRKERLNYLNEIFAPEINKIDPTFFERLDESFLKLEDRKYKDKYTLFIDKNFNDKTYFKKFNTIYHLQKYLMESEKKEDIRLIYLAIRHLIKYRGNFLNSSNPDNYSSKIDELDFLERLTRVFEIINSYEIYSKFNKPILDINDIKSLIKANKDSKGINSKKENFIKIFNKEEKKNNLIDFVASLLAGSSVELNKILKKDEDGPQNSIKISFTDDLTEKFLELRSEYPEYDDFISSIEDLYRLYQALYINKYVQNSLPQTMVERFNTYKTDLKLLKGYIRKYYSTKYDEVFNSIENKMSYPHLVRHYCSDIDKKTKVNISNDKSFSRIEFINYLKNEFSFDQDDELTLKLKERINSDDFLLTQSDKSNGNFPYQLNYFVLKKIIINQEKFYSFFDEKDSNGYVNKDKIISLLTFKIPYYIGPLSNNYDESDENNHAWIIRKKEGHIRPWNFDEIVNVEDSAKKFIQRMQNKCTYLINEYCLPKDSITFQKYLVYQQLNTLYVNGKFYFNSDNKDDLIINLYSKNRKITKKLLQDYLSNKLKEKVVITYKNGKDKDVEPNLHSLSSLFDFIKVFGSYEEVDKNIDLIENIIRDIAIFEDKSILASRLENEYKLNKDQIRIIKSFNYNKFSRLSKKLLDGIKPFDKNGVLINKTILTILKDYDGSENKPATLMEILNSKDSEYDFDSVIKIENSKEEENESVDSFIENSYLPKISKRPTILTCRIIEELAHALKANISEDFEFYIECARTNKSDKKATKTRYEKLMETLSKSGLKSQVDSLINELKKYENDKSKLNAESLYLYFMQLGKDMYTGDQIDLNTIIENYDVDHIIPRSLIKNDSLDNKVLTEKKFNNGKSNIYPLSKIDLWEYNGGRKKALEFYKKLKDNNLISERKYIALTANTDLDNDTLEGFANKQLSTTNQSVIGLKEVFEDYYSINSENIILSKAENVSDFRNNFDLVKSRTANNFHHAQDAYLNIFVGSAVNSWIKNIFKLWRIDESNEHKYSDFVSFVREKRYTLNPIKIMEKYVKDQSDEFNELKDVIYNYKFIFTKTRTYIKKDFFPKSTVYAANSCANINTKNNLDCKKYGGFKEYAFGYYVLIKTKDNKFILEPVPYIFSKNANQYLDNLYKKNYEIYLDNVKINTKFQIEKRQFIITGKTVNSYLVRNSIERFFPYDLIKIIKKVDNFMNFLKLNKIAINVKNQESINKAIDDLNNLHKIKDKNNELISKENKFGEIETLTSNELINVFDYLFTLYSKDAFSYSFSKALIYEQEELKNKFMNLDILLKTYTISEMLNYLKTNERKKINLIKLDKEENCGKLTQNKVLPLGTKIIFESNTGLYKKEIILK

SEQ ID NO: 83 - protein, 1411 aa, Unknown
  OMNI nuclease sequence
MAKYRIGLDVGTNSIGWAVTDLNNKLIMKKGKKLLGVLMFKESSGGDKDPNKLRRTYRCSRRRIRRRKERLNYLNEIFAPEINKIDPTFFERLDESFLKLEDRKYKDKYTLFIDKNFNDKTYFKKFNTIYHLQKYLMESEKKEDIRLIYLAIRHLIKYRGNFLNSSNPDNYSSKIDELDFLERLTRVFEIINSYEIYSKFNKPILDINDIKSLIKANKDSKGINSKKENFIKIFNKEEKKNNLIDFVASLLAGSSVELNKILKKDEDGPQNSIKISFTDDLTEKFLELRSEYPEYDDFISSIEDLYRLYQALYINKYVQNSLPQTMVERFNTYKTDLKLLKGYIRKYYSTKYDEVFNSIENKMSYPHLVRHYCSDIDKKTKVNISNDKSFSRIEFINYLKNEFSFDQDDELTLKLKERINSDDFLLTQSDKSNGNFPYQLNYFVLKKIIINQEKFYSFFDEKDSNGYVNKDKIISLLTFKIPYYIGPLSNNYDESDENNHAWIIRKKEGHIRPWNFDEIVNVEDSAKKFIQRMQNKCTYLINEYCLPKDSITFQKYLVYQQLNTLYVNGKFYFNSDNKDDLIINLYSKNRKITKKLLQDYLSNKLKEKVVITYKNGKDKDVEPNLHSLSSLFDFIKVFGSYEEVDKNIDLIENIIRDIAIFEDKSILASRLENEYKLNKDQIRIIKSFNYNKFSRLSKKLLDGIKPFDKNGVLINKTILTILKDYDGSENKPATLMEILNSKDSEYDFDSVIKIENSKEEENESVDSFIENSYLPKISKRPTILTCRIIEELAHALKANISEDFEFYIECARTNKSDKKATKTRYEKLMETLSKSGLKSQVDSLINELKKYENDKSKLNAESLYLYFMQLGKDMYTGDQIDLNTIIENYDVDHIIPRSLIKNDSLDNKVLTEKKFNNGKSNIYPLSKIDLWEYNGGRKKALEFYKKLKDNNLISERKYIALTANTDLDNDTLEGFANKQLSTTNQSVIGLKEVFEDYYSINSENIILSKAENVSDFRNNFDLVKSRTANNFHHAHDAYLNIFVGSAVNSWIKNIFKLWRIDESNEHKYSDFVSFVREKRYTLNPIKIMEKYVKDQSDEFNELKDVIYNYKFIFTKTRTYIKKDFFPKSTVYAANSCANINTKNNLDCKKYGGFKEYAFGYYVLIKTKDNKFILEPVPYIFSKNANQYLDNLYKKNYEIYLDNVKINTKFQIEKRQFIITGKTVNSYLVRNSIERFFPYDLIKIIKKVDNFMNFLKLNKIAINVKNQESINKAIDDLNNLHKIKDKNNELISKENKFGEIETLTSNELINVFDYLFTLYSKDAFSYSFSKALIYEQEELKNKFMNLDILLKTYTISEMLNYLKTNERKKINLIKLDKEENCGKLTQNKVLPLGTKIIFESNTGLYKKEIILK

SEQ ID NO: 84 - protein, 1507 aa, Unknown
  OMNI nuclease sequence
MKEKAITLGLDMGTNSLGWAVVDNSTNDLVSYHGHPMWGVRMFSESSSAEDRRKKRGARRRYQRRRQRILLLREIFQKEICDKDPYFFYRMDQAFYVSDDRTDEGKGYLLENQKATKDFYNKYPTIWHLRYDLVTNKEKKDIRLVYLAIHHILKYRGNFLHEGDIELSAKPNDELKMFISCISSTYEGNFEKEEDDDNANWDKYFVVEQINNDKFIDSLISIIDNYLDRSKKLTEVVDPSKKRYELFADELIQLVGEPKNILTELLPDALFKGTVDLSKNRIYKEIYKNQIDLDKKDLKIIFNSDDFENKISNLSSKLKEISPLIEGLIYLKSIYNNYYFKDFMKGYSSLSEAFIKKYNENKEDLKSLKSYYDKYLSDKKNSMFRDNKVNNNFVNYIGHYSPNEKNPDGKSWSEGEIIKIEKKKSDYSEFLNKLKEDLRDSLNKYPEAQKEADGFLKKIEDNTLLQRLNNASNSVIPMQFNKKELVAIINNQKEYYPDLFTDSNISHIEQIFSFKREYFIGPIDFDKNNKSKFSWVVQKETALNKKQKIYPWNFYDVVDKKETQKNFIQRMLNHCTYLKGENDYCIPSSSISYQAFVCLQYVNKLRDSNNNLISVDAKQQLFKDLFLSNKTVTAKEIKEWMYQHKLGNTASIPTCNCNMSTYISFKNLNKYKKYEFLRLEQIKEIDEIVKLMMIFSDKETRNDILKNDYHFDDEDIKQIKGFNYKNWGRLSDRFLNAIRIEYHDEEANEHREYNSLNNVLWFTNFNLNEILFNPKFNFHDEIEKYNENKYIDFKESDDDFLKNWMEKNVCVSPIWTRSFVQTYKLIKEVNELLKEEGKEISYYSVECTRENKSDKKGKETCSRYDRLLNIFKDKDFNKEAIDQGINVSTLIKSLQENKDSINNSDYFLLYFQQLGKDMYTLEPINDLDEIGTNKAYDIDHIYPQSILKDDSISNRVLTKSTINRDFKKNKFLSDPNCGLKLPKEAFSFYKFLFDNSLISRTKYNRLTEKEIHVDSLESFINRQKVATDQSTKAIIELLKFLETNKYCERNNEMSRDEARKEAEKHIIYSKAGIVSDFRKKYQIYKSRIANNYHHAHDAYLNAVLGKTLKEYYDDKKIYLFGDELKKRIQNDGEYTINPDNILSKRVRESKDHHIIWGGIKEIDFIKNNIQNNFDIRETMYTYYGNTLIGQETVEGKKGQGKETIKSLTPNGNKMDLKKYGGYKQASYPYFYLIEKNNGEAMICPINSFYKDDSKIDRFIEENFFKKDKENTDKGKPLFKKILKLKINTVILSPKDDNKHLRKMYITGSNQFDKDLRIKNGFDRNFKKEDMRTIHMITKFIKVYELNDCFENCNPRIEFGINENTNSYIQLKNGNDCFLIDEDIEHLYNSIFELWNKPMYNIATTRNLIEKISHNYDSWFKNRILSKERFINIIYILNEMLKYLKTNDSSTLKLKDNYLKDNKDNKEKKDKGKDTGVLKFGIHLYKGMKIVSYSITGFKTKVLYKVKK

SEQ ID NO: 85 - protein, 1334 aa, Unknown
  OMNI nuclease sequence
MTKFYKRFTIGVDLGTGSVGYAVIDGEYKLVKLKGKHAWGSVLFDNAQTAKTRRLFRSARRRFARRRERIRLLQSLLAPIAEERDPGFFVRLKDSALVCGEGTFFRSNKYNLFNGDVTDKDYFAKYPTIYHLRRYLMTATEKADPRLIYLAIHHIVKYRGHFLAEGQSIDAGGNNLEGSLVRFFEELVNVGADLHYIGKTEKLAQILKDKAKPRAVRLTEAIGLFADSGYTKYAKSAFGAMLGYTVGLSDAVDAVADTEERTEGKISDDNGKDVKFCFSAADYDENEEGYLGAIEDRSALFLLMKEVYTAVMYDVILRGKKTISEAMTDRWEKHGKDLKALKTVFAANMTKEQYKAFFSGTKDVNYVRYIGDKSKGWFKDRVSAEDLGKQVKKLLEEMPDSAEKSYCLSEIDKEDFLPLINSTVNSYIPYQFNEKELTAIIDGQSKYYPQLAQEKDKIVSLLTFRRPYYVGPLKGDKFGWCEQQIDGLVTPWNFTDKVDTDILAEKFITRMTSKCSVFNDEDALPRNSIVYQAFAVLNELNKIKLKDRDPLPVEWKKEMFLTLCCAKRKVSKKDIAVYLRRKYNEPIGVDEITGMAEDRLTATMSALCDFRSILDGNFDKTKLDAYEESFRILTVFEDKDMRTKRLQRQNIYTDEQVKRLASLRYTGWGSFSRRALTEVRGRDGKNVLETMYDTDMNFNEIRFDKELGFAEELNGEGEVIDKFSYDELKDLRCSPIVKQSVWNAMRIVEELCELAGNDPEAIYLETTFEERNKKSTSSRVQNLLDLYKSIKNDTYFNKECEANLKKLDKRDRLDDDKVFLWLLQLGRCMYTGDPISFQDLPNCQIDHIVPRSVTPNDSLSNRVLVTTSANQIKGGRLGMDPGIVRNMLPFWEFLYGKRFIDSKKFYALQKTQYGEEDLKGFINRQLVDTSYINRLVRELLQKRFPNTHIGGIRQSLNHAMRVKYAEQGKAGFYKIRGLNDMHHAKDAYLTAVMGQFRDKGCPSWGSICKMYLSERTDVDAQNGKEEEKARNGIVLGLFERHQNINRDGEVVWDKPFRDNVFETMATNDCIVVKRLKRKAKSAFYDQTLYGPGSAKKNLIPQKYRNGEPMPTEIYGGYSNENDAYYVAVDCGEGKGKRYNRYRLIGIPVVVHQARNIDGYIGTVCGQNAKVLFPVYKYQLIEFNGQKCYIAGDSEVQNATQLIVDPQYEKLLWICSKEENRISPKEIEKIVEQTPRFIEHYCSKIDKFFPEFAKFASVLRNIAAEKLDDMEWGAKRKLINDMLVVTQAGAGRIDLDKKLGGGSYGRLSGKTILPDKVKWIDRSITGLHERVRKGV

SEQ ID NO: 86 - protein, 1350 aa, Unknown
  OMNI nuclease sequence
MKSYNIGLDIGTSSVGWAVVEENTQKIMKKGKKTLWGVRLFEQATTAAGRRGFRNTRRRYDRRRKRIELLQEEFKDEMNKADSTFFTKLKESKYNKNDLSNKTIAILKEEQNKINEYNKKYPTIYHLRKHLIDDTEKEDIRLVYLALHHIIKYRGNFLYNGENFNVNNLNIEERLEEALLTLVELAPNLGIPENYNEILDLNRISEIIVSPSKNDIKVELKKELEKISDNKKFISEFIKLITGNKFNIKDLLILDEIEKMTISFDDSNYDEEYNELQEVLGDSIEIIDSSKKLYDSAFLKKIFKGSNNTSLSALMVERYNTHKEDLRFLKEILNTNRQVYNSIFRTKDKKCLYEKYIHNELSYEEFKKYLLKHLETTFDNLKDVAIIEKCNKNKLRIENGAFLPRITETENGRYPYQLNKDELIKIIENQGKYYPFLLEKVVNTYKIVKLLEFRIPYYVGPLNTTTKLKNVKNSNAWLVKKVNNIQITPYNFDEIIDKGATAEQFIKRMVSHCTYLLNEYALPNKSILYSKYKVMNELKQIKVNGEKIENDIQHKIVKELFEKTSGTITDAKFKMYLYSSADFDMYNGDINVTGYSADGKFANNLQSYIDFFGENGIFSGTEYKENDAEQIIEWITIFDDKDILEDKVRTEYPALNNKQIKQIIDKKYSGWGSLSNKLLTTKHYKDQETGLKKSILDLMYETDENFMQIINNDEYDFQSMIKENNIFKDTAKISYSLVKDLATSPATKRGIYQALKVVDELVKYIGYEPKNIVVEMARSEDKKERKDDRKKYLVKLYEKFKGEIKNYNQLISEMEDYEKIDTQRLFLYFIQEGKCLYTGTPLNIEDLDKYEIDHIIPRTLIKDDSLDNKALVLKECNQIKKAGLVLPSEYRTSQNIVWWTHLRKIGLMSASKFYKLTRKAYSDEDIQGFINRQLVETRQVTKHVANILNNFYKKTKIVYLKANLSHNYRERYELFKFREINDYHHAHDAYLAAVLGEYKEKYMKKTLNYKMITELNARLKELGNYNKLKYGYVINSLDSDVNDIVNEISKSFVDEETGEVLFDAERFNKIVEDNLYRNDILVSKKTEIRTGEFYNQTKQSKGRKGVSLKKNMPTEMYGSYTSLNPAYATMVNYTKNGQETRRIVGFPIYLKSLNEFEIEEYYRKLLGLEKDELIRIENIKIPFYSYLIWNDQLCYLVGASNKAEVCNAKQFKYDKYFMKKHKKALNEIFNKKETNYNEYHNDIDEIITYIVDKIESDYKLFENLVPELKMMVNYKKYENFTIEEKVNIIKQLTKLLNCKSDNASFKFLNEKYSSAFGKKNGRIIESTTINSFSVTGIFCNKERQIWVLEQ

SEQ ID NO: 87 - protein, 1122 aa, Unknown
  OMNI nuclease sequence
MKYRIGLDIGIGSVGWAVISAEEAGHLARIEDFGTRIFDSGEDPQTSESLCKQRRGFRGVRRLTRRRRFRKELLKNHLLNIGFLNATFEDELAECRNADVYQLKLRGLDEKLSPAELYKCLVHTCNHRGYLEFYEPEENDKEAGENLRAANRFESDFSASGKRTVSEFLLDGFSENGFVKYRNRSGGDVPHLLIRRELLKQEIRQILLCQKRFYPCWNENNIDRALEIIFAQRDFEDGPGNPDDPTRRYHGFLETLGKCPFYKDDARGFRGTVISDVFAVTNTLSQYRYCNVKTGEFSLEKTVAKEIVDFLLLNGKINLTDVKKILTAHGFKLLKSDLADANALGKALKFLPLAKKAVEESGESWESVIAEEQFDVTVPSRLHQIGELISKYQTPRRRKEEMKKAGVDPRLIAAFANKRISGTASCGYRYMCDAIVAFLNGDIYGSYQANRIQSDAETDPVVKSVKLAPSAIDDPEVRENRVVFKAINETRKIINAIVDIYGSPEEIVVEVASELGKSVEARDELIKRQRANEKENAEAKRLLSELLGIEATKVSPSMIERYKLFNEQEGKSAYSQKPLGELKDVVENRDRVYEIDHIVPFSLILDNTLHNKALVFAEENQKKGQRTPLMYLGAAEQKSFVAFVNHLYARKKDGISRKKYAYYRCETLYGQEAEKLMNEWKTRNINDTRYITKYVAGLIERHLLFAGDKKQHVQTVKGSVTQKFRREWFRDQRWGSDEKDRETYLNHALDAVVAANLTRPYIEIGSDSLRLLSIFKRSRGRYTEEYNEYLEKCVSKMKKYYGFDEDYTRKLLCRAGRIPSFVPRLAEEVAVRFVVDQEEKDEKTFTEEVNAVYRLDSEFVVPPHFPVTSCKQDKKFRGTIADSNPVRVEMIDGTPHKIKRTDVREIKSDDLEKLFTTDASLRTKLGEILNGKDKNYTVGKYLDENGLTHFTASDGTVIRKVSLDGGVFSNYWRQELGDGNYTNLSMLKYYCVEVYEDQDGKTRIYGIRYVDLIRRNKKLYQKADSYPSGYGKHIMYLFPNDFVRILNEKNEIKFEGYYRSVKNINRSQLWLRKPNNREMIVKSIALSDRVSRVDVSILGKKGGEIRCSVPFPSTGEKNLGKG

SEQ ID NO: 88 - protein, 1165 aa, Unknown
  OMNI nuclease sequence
MKESLQYILGLDIGIESVGWAVIRCAPTYRIEDAGVRLFATTEQKQGKSNTNQDRRIFRAARRLVRRRSHRKAMVKRHLERIGLLRPGEVEAFFEEGGHDLLRLRVKGLDECLSPVELAACLINLCNHRGYREFYPLDEEEKKELTAAKRQEREQESRGIERVKQIMEQGQYRSAAQMLLQDKTFAPADGGPMRVYRSHPHKADQYPLSRDMLRTEAEKILNCQSQFYPCLRQNYQTLYRKGGADRRVEMSSTEFLLQLIFEQRDFEDGPGDVNDKMRRYTGYLSTLGKCQFYHGEDRGARMTALGDLYAAANALSQYRYLDTKTGELVLPPALARELMTAALLDAELPAKKINDIAKKYGVKANNKGIKKTELAPNCIKFLRAVRPVFESEGIAWADVLGADPLQAQLQPDSLLNRIGRVLSHYQTPRRRQEELRRLPLAPVAAVKETLVKKLARLHLSGTAKVCERYMREAVNAFLSGESYGNFQARLLAEQERGPAVRAAGNYVKLPPFPKDADFAKNSVVARSLNEARKVINAVVARYGSPWAVNLEVASELGRSYAERSEIESNNKKNHAATEAERKAIAEIMDIADPANVKGSMLERYRLAELQGWRSLYSGAEFTDKRAVLDPRSTLVEVDHIVPFSLILDNTLHNKALVFAEENRVKGQRVPLEYLTDPARRKAFVKWVNKLAADKKISKRKHEYLLLQDLHDSGLLDEWKTRNINDTRYIAKYLRGYLERNLKPAAEHRSQFVFPVKGGLTSRFRCKWLNENTWGRKDKDELRKLTTLHHAVDAVIIANLTPATAFIAEADFRLRRVYKMAGKRKTREYWDLYNKDLDTLVTYFHYPHALAERSLNIERGGKNGLNITALIERINEEVDVRFGDPGQESDPAEYSRRVVAFYQDDQAFAAALCPILTSRKQERKWQGTLTGGNPLGSMEVDGELLGRTRTDVLLLTRKDLERLYTNDGDLRDSLAAAFAGAQGEKTKLGDLLAAQGKTEFRTQKGRLVHKVTLKGGVLDNYYIKQIGAHNRSVLDTTEYYCVEVYRDTKGQTKVRGIRRVDVTHKDKKLWLTCPYPTDYAEHLMYLFKNDYITVETKNGLQFEGYYQSPAGLKQNKFNGKECNCSVTVPFRITGTATVKKLSIDILGRKGGEIRCGAPLSLLPEKS

SEQ ID NO: 89 - DNA, 4395 bp, Unknown
  OMNI nuclease sequence
atgaagaaatattttttagggttagatgttggaacagaaaacattggttacgcacttactaaagattatgaagttatgcaagtaaatgggaagcgcaccatgggtgtactatcttttgaatctgcaaatactgcagtggataggcgtacatatagggcgacaaggcgtagattggataggcgccgttatcgtattgcgttacttcaagaactgtttaatgatgaaattatggctaatgataaaaattttctaaggagacttggggataatgatttgtaccttgtggacagaaatgtcgaaggtaaatattctttattcaatgatactgattttaatgatatagcgtattataagcaatatccaacaatatatcatttgcgtgaaaaacttatgatggaaggtacagatgatatccgattgttgtatctagcaattcaccatattattaagtacagagggcattttttacttgctggggaagtttccacaaatgaagtcggtggcgtaaaacaattggaagaattgattaataaattaaatagtaaactagatgaaaataatgatgaaaataagaataatgataatacttgtttttttgacaagtttgcaacaacggctttgagtgatgtgaaagatttgatttgtggcactggcgacattacaaaaaatatgctaaatcaaattacaataggcaaaaaatacatttcaaagagagataaaaaaaataagcttaatgaattgtttggtgtttcttctagtaaaacatcaaaaaaaattatagatattgtaatgggtggtaaagttaatttaacagagttgtttggcaaagagtactatgaaaaagaagaagtcaagggttttacaatggcagaagagtgggagtcaattgaagatttgcaattgattaaagataatattttgcatattgatattattgatacaatcaaacaaatttatgattgggtaacacttaatgaaatgcttaaaggtaaacaatctttgtcaagtgcaatggttgaaatttatgaaacgcataagcaagatttgcacgatttgaaagaatttataaaagattatgctccaaatgattatgagagagtttttggagaaataaaaaatgaaaaaggtaaaatagataatagtatttgcaactatagctgttacataggtggtggcaggtataatggggataagattggtgcaaacggcaggtatggaagtacttgtacacaagaagatttctataaatttataaaaaagattattgaaagcgttacagttgaggaagcaactgctttacgggatgacttgcttgaaagaatagctaataaggattttatgccaaaaattgtttcaaaaaacaattctactataccatttcaactaaatatgatggaacttgatgggattttagataaggcaagacaaaatccaaaatttacttttttgaatgatgtagataatggttggactattgctgataaaataaaatcacttttatcattcagagtgccatattatgtgggaccagtgaaggaatatgaagataatgataacaacaaaaggtatgcttgggctgtaaggaaagagtccggaagaattactccttggaatattgatgataagattgacaaaaaacaaagtaatgagatatttattagaaggatgacaaacagatgcacatatttgaaacttgctgataccttgcctaaaaattctattttgttttcaaaatttatgtgtctaaatgaaattaattctatgaagataaatggtgatgctatttcttgtaaagagaagaaagcaatttttgacaatgtattttgcaagaaaaatccaacaattaaaaatatcaaaaagtatttgatagaaaattttggatatgaaaaaggtatagtcttgagtggtattgataatgaaatcaaatcaagtatgaaaacctatattatatacaaaaataagcttggtaataaggttgatgcagatcctaatatgattgaacgaattatttttttgtcaacaattcatgaggatagccaaatgttggaaaaatcgattcgtgaagaatttggtgataaattgactgaagatgaaatcaaggctattaaaggtttcaagtttaatggttggggtagtttgtcagcagagtttttgacaggatataaaaataatggcatcaaattaatgtttgatggagaaatgcttgatattattgatataatgtatgagtacaacttgaatttgcaacaaattattttcaatgaaaagtgcaatttttcagaagcattagaggcatataatttagaacataacattgtagaggactcaaatgtaagttataataaagacatcgcggattatccttgttctccatctgtcaaaaagtgtgtttggcaatcatttaaactggtcaaggatattgtgaaacaaactaaaattgtgcctgatgtagtatttattgaatcttgccgtgaaaataatgattttaagaaaaatcaaagaacaagcaaaaggcgtgatatgattgttgcaatttatgatgaagcacgcaagaaaattaatgaattacaaagggataaaaaggcagaattctcaattcaagagcttgaaggacttagtgaagatattgattattgccaaaagactctagataattattctgatagcgaattgaaaaaagaaaatttatatttgtactttatgcaacttggaaaagatatgtacactggcaaagctattgatttgaatcaagttttgtttggcaatatgtatgaccatgatcatattatacctcaggcagtgattaaggatgatagttttacaaacttagttttggttgctaaaaaagaaaacgctgagaagtcaagaacttatccactcgaatctcaatttagacaaacaactttgtggaaaaaactatacaaaattgggttgctaagtaatgaaaaatattcaagacttatccgtcagacaccaattactgatgaagaacaagaaaagtttattaataggcaattggttgaaacaagtcaaactgttgtattattaagggatttgttgaacagatattttgcgagcaaaaatgttgaagtggtgttgacaaaagcaggtaatgtatctatgtttagaaaagaatttgatttaacaaaatcaagagaagttaatgattttcaccatgcttgggatgcatatttaaatattattgttggaaatattttgaataaagagtttaatcataattggttcattaggcaagataatggaaaagataagtcatataacttcttgcgtgtactaagaaaacaagcaactgcgaataacaatgaaatactgaatattattgagacaacaatgaataatatcgattttcaaatggttaaattgccagaagagaaaaaaggcaacttctattcagaagtgttaaaaactcatgaaaatgataaagatagcagtttaataccaatgtgcgatagcaaaattgtgggtggcaaagagattcatcctaaatgcgatacaactaagtatggtggttacaaaactgcaaatactgcatattttattcttgcggattcgattgataaaaaaggtgcagttcaaagaaatattgttgctatatctatttttgatgatgcgagaattaaaaatggtaaaataacttacaaagaaatttttgaaagaattggcttaaaggatggtaaactcgcaaatgttgaaggaatgaaagtgcctatcataaaaacgggttctttgttagattttggtgcttattgcttgagattagctggaatgacagggaatcggttaacttttcataatgcaaatcaattatttgttagtaaagatcaaaatagatatatcaaagaattgggcatattagttgacaaagttgttaaggaaagcaaaaaggatactaaggaagataagaaagaggcaatggcactagaaattattgaagaaattattagacgaaaaaataatcctgacaataaaaattccaacataattgtagtcaataggaaagataatttgaaattgtatgatttctttgtgtataaattgtcgcataatccatataaagatatacctacatatagcagtttgcttgatattttgcaaagaggaaaagaagactttgaacaaaaggagatttatgctcaagtactcctattatttaatataatcaaagctttccaatgtaatgcacaaaaagttgatgttagtgctttatcttatgttaacaagaaaggtattgctacaaaaggtggggctggacaatgcagtattgcaataaatagtgatattactgaaattgacaaattgattttaattaatcaatctatgtctggactaaaagaacaaagaatacagcttaatttgaaaaaggtggacaaatga

SEQ ID NO: 90 - DNA, 3264 bp, Unknown
  OMNI nuclease sequence
atgactgatatacggtatcgggtcggtatagatgttggcagtttttctataggcatggctgccattgcgatagatgaacaagacaaccccagtgctgttttaagcatggtgtctttaattcatgattctggtttggatccggatcaaattaaatcagcggtgacaagacttgcttcctctggcattgccagacgtactcgtcggctctatcggcggaagcggcaccgccttcaaaaactcgatagctttatcacaagccacgggtgggcattgaaagacttcgaagaatacccagatccctatcacccctggcaggtacgggcggaattgagtacttctaaaatcaccgaccagggagaattaggagaaaagctatcagttgcgcttcggcatatcgctcgtcaccgaggctggcggaatccttattctaaggtaaataccttgttcactcaggtaccgcactcttcgggttttgtcgctgtgcaggaggagttttccaagcttctaggtacttcttttcctgaagatgtgactttaagcgaaatggtggtatcagttccgactagttcaaaagcactgcgtggtccaaaagggttgttatcggcacgattgcaacagagtgactatgcaaatgaaatactaaaaatcgctcagcttcaagatctatctgaagggttgaccaaagaaataattcggcatgttttcgctgctgaatcacccaaaggctctggagaaggcttaactgggaaagatccacttcaacccaacgaatatcgagcactgaaagcatctgatgcatttcagaaatatcgaatcgcagcacttattggcaatcttcgtattagtgacaagtcgggacaacaccgtctaagcaaagaacaagtcaatgtagtctttgatcatttatgcaatctatctttcaaagaggagcccagctggatcactatcgcaaacttactcaacatagatcgcggccagctgctcggaactgcaaagattactgatgatggtgaacgtgcaggcgctaaacctccagttcacgataccaataggagaatcgaaggctccaaaataactccgttggtcaactggtggaagcaagccaacgaagaagaacgtgcagccatgattaatgccatgtctaatggcaaggttgatgattacgactccgctactggtgctaacgtacaagcctttttcagtgatctaccagacgaggaacacacaaaactcgatgctctttatctgcctatcggccgagctgcttactcagaggatacccttcaacggctaaccgcacagatgcttgacaacgccttagatctgcatgaggcacgaaaagcagaatttaatattgagaatgactgggctcctccagcaccagctataggtgagccagtaggtaacccagccgttgaccgagttcttaaaggggttgcccgctggcttaaagccgcagaaagcacctggggtgcaccggtttcgatcaatatcgaacacgtacgcgccgctttcatgagtgaactgaaaactcgtgaacttgatcgcgataataaaaaaagggcagagagaaacgaagaacttgtcgccgagatgtacacaaatctcaatatcaaaggacggccccgcgccgctgatatatggcgctaccaatcaatacagcgacaaaatggccaatgtgcctactgcggtgtacccattgattttaaaaactgcgaaatggatcatatcgttccccgagctggccaaggttccaccaacaccagagacaatctggtagctgtctgcaagccctgcaatagtgaaaagagcaatgtatcttttgctgtttgggctgcgaagacctccagagagggggtctctgttgaacaagcagtggaacgaactcgacattggatagcagaccctggactaaacaaaaaacaatttgatgcctttgtaaaaagtatttgtaaccgattaacacgcaaaaccattgatgaagaaatcgacagtcgctcgatcgaatctgttgcttggatggccaacgaactacggtcacgaatcgctcaaagatacaaaaccactggcaccaaagtacgagtgtacaaaggcgcgttaactgctgaagcacgagcagcttctggaatttccggcaaccttcgctttattgacggcgtcgggaaatcacgattagatcgacggcatcatgcggttgatgcagcagtgatctcatttatctcagactacgttgcagaaacactggctcaacgatccaacctcaaattctcacaagaactccgccgtaaagcaccacaatggaaagaataccaaggtagtaatgcagcccatagagccgaatggaaccgctggctacaacgaatgcaccacttgtcacagcttttatcacaagccctcgaacaagatcgcgtcgttgtcatgtccaacttacgcctccgcctaggtaacggcgcagcacatgaagacacgataggaaaactcacatccataaaagtcggtgacgtaatcacgaccgaagaaatcgatcgagcatcaagtgaagccctgtggtgtgcgctaacccggcaccctgatttcgaccaaaaaactgggcttcctgcgaatccagaacgtagcatccgtattcacggcactcacctaacagcagatgacaccattacttcgtttcctgtcaatgccgggtgcatcgcacttcgaggaggatacgtagaactaggatcaagtttccaccacggcagaatatataaagtaccgcaagggaaaaaatttgctttttacatgatgcgcgtatatacaatcgatcttctcccctaccggaaggaagatctattcagtgtgacattaaaaccacaaacaatgagcgttcgccaatgtcaccccaaactacgtcaagccctagaaaataacactgcagaatatctaggatggctggtcaccgacgatgaacttcttatcgatactgctaagttcaacacgggacaagtagctggtgcccaacaagaatttggccaaataaaacgatggcggctagacggattcgtctctgattcaaaacttcgattacggccattacatatgagtaaagaaggattaaagcccgatgcctcttctgattcaaaaaagatcattgataatcccggatggcgtcctgcagtaaataaacttttcaccgacagccatgtcacagtaatccggcgagatgctttaggccgcccaaggctacaaagtacagcacatctaccaatcacgtggcaggtgaaataa

SEQ ID NO: 91 - DNA, 4683 bp, Unknown
  OMNI nuclease sequence
atggatgaagttaaaagatattatatgggaatcgatcttggaaccgattcgtgtggctggtgcgttactgatcagaattttagaataatcaagaaaagtgggaaacacctttggggcattaggctttttgatgacgctaaaaccgctaaagaaagaaggagctttcgtactcagagaaagaggcttcagaggaggcggtataggatcgcttgcctcagagagataatggggcctgctatagaagcagtggataaagacttttttcagagacttgataattcgaatctatttgactggaaggatgaatctaagaaaatacctttaaagaaggattctctttttaatgaccctcaatttcacgataaggagttcttccgtgctttccctacggcttatcatttgaggagttatctgcttactacttctaagagagtcgatattagatggatctacctggctctcgcacatatcattaaatatcgtggaaatttcctcaatcccaatgaagactccaatggaaatatggatttgcacgatattaagaattcatttcaaagtatcaatgctattgctcaaactatctatgatcaatgtgatgatcctgacttaaaagaaaagggaagttcatttatcggttttggctttaaatccactgggagtagttttgatcccgattctcttaattcttttgaaattaccgatgaagaagctattaaagtaaaagagatatttaagaattgtactggtgttaccgaaacttttgaaaagcttgccaatctttttgacgaagctgtaaaaaataagttcctctcaacgattcttaaactgatctgcggagggaaggtcaattctaaggatctcttccttactgatgactacgtggacgatcagaattttaagagcatcaaattagatgactgggatgaaaaactcgagcctaatctctcatctataaatgacatattcgctagccttttgcaggaatgcaaagctttgtatgatgcgcataatctcacgaatctgctcggggattatcactttatcagccaggcgatggccggtcggtgggatgaacagaaagatgaatttgaaggtggaaggtacaatgaacataggagtcaacttagagatttaaagcatattgtgaagacctattatcctgataagtattctgttatttttagagacttattagataaaggtcaaaaggatgatggtaaagagaattatccttcgttgataggctcttctatggtgaacaggcggaagataaagtctaagcatgctaagatagacgacttttattcattccttaagaaaactattaatcttgatgatctttacaagaggcttaaagattcttcactgcctgcagaaaaagatgatttaaagatcgtagagaaaataaatgaggatattaagaatcgtaagttccttttgagacagaattcaggagagaacggatatattacccatcaattacatagagctgagctactaaagatcatcgataaatttaaggcggattatccttgtcttggtgaaaaggatgatagaggtaactataagatccttgacattttgatgtttaagatcccttattacatcggccctctggataataattcaaagaatgtcaactcctgggctagacgtgttcccgtcaatcatccccaagggaagatcaagccttggaattgggatgagtttgttgacaagcctaaagctgctgaggaatttgttgagaggatggttaataagtgcagctatcttctgtctgagaagacccttcctgccaattcacttatttatactaagtataaggttttaaatgagatcaataagatagctgtcagtatcgacggcagtgtttcgagattctttagtcaagatgaaaaagatagcctgtttaagctttatgaggagaaaggaaagcctactttgtctgatatcaaaaattgggctaaattgtacttctcctcggataaagtagaactctctacctcccagtcttcagatagagttaataagcttgataagaattacttgcagtctaatttgaattcttatagggattttaagaatattctaggtgatatcaatcatactaattttaatattattgagtcgataattagggatattactatttttgaagataagagtattctcgacgaaagactgagaaatataaatatatcgggacataaattaaacgatgagcagatctccaagataaagaatttaaattataagggatggggtgctctctctgctgaattgctggatggcataaagggtatggatcatgcgcctcaatctgaagaagagatagagagcgcagacggacctacgattcttgaagctatggagaaggtttctgaggatgagaatggaaattatcattccgataattttatggaagtcctcaataattctaaatatcatttctctgacattatcaatttcatcaatgaggagaaaggagcggaaacatataagggatttgttaaatatatagaggattcctttggctctcccatgatgaagagagcgactattcaggccatgaaagtcatcagggaagctgagcatattatcgggcaccctatcgatagattctttatcgagtcaactaagagccctgacaagaatcaaaagggtaaaaatgggaatgataagcttagaagccgtgaattgagcaagagatatgagcagataatgaagtctattagcgcatctgatcaggacaaaatcaataaagatgctaacgaaaagttaaagggtttaataggtaaaaacgataattctaaatttagaataaagcgggtttatctctatttcctccagatgggtaaagatgtttataccggtgaagatctaagctttgatgatgtgctcaaaggtactgataaatacgatatcgatcatattatccctagatctatgatcaaggatgacagcctggataatacggttctgacatctaaagccgtcaataatcaaatgaaaggcgatagatatcctattccaagaggcgtaataacttcgaagggtagagaggctatagagtttcttcataggaacgggttaatatctagtgttaagtataagcggcttctcagaacgaaggactttacggctgaggaactggctggctttattaatagacagctgacttctacctcacaatctgttaaggctcttgggcaggtgctcaagatcgatactgatataagacgtgagaaggccaagaaatccggtcaaggatttgaggaatatcggaatcctaattggaaacaggtgattgtttatcctcgtgccagcaatacacatgatttccgtgtgttattcgatttcccgaagtgccgtgaagtgaatgatttccatcatgctcatgatgcttatcttaatatagtggtgggtgaagtctatcgatccaagtatggagacattgctactgctaaaaagataaaagaacttcgggagcgaaagattaatgaagatggtagtgaaacaggtcctactaatgtctttggaaagatttgggatgaaaatataaagcgtactggtagtggcgacacttcgcgttttgattggatacctgatactaaggataaatctaagaaggacgctactatccgcatcattaaaaaggagatatctagaaaagatattcttttcacaaggatgcccatcgaaaaaaatggtggtctttgggatattaatatcattagtcctaaaggaaaagacaatttggtatctcatatgtctatcaagaattcgcccaaggattctcggctttacaaattgcatgatgtagaaaaatacggatactacaataatcctagtgctttatatttctcagttataagagctaaagtggataaaaacaaagatttttcctattaccttgttcctgtacctagctatattttaagcaaaaatgctttagatgataatttagtaagttactataaagttaatggttttgatcaacctgaaattataattaaaaaagtattgttaaataccatttgctcatatgatgatgataaatctcaacctgtatatagatttatgattgccagtaagacggggaaaagtattaaagtttataacgcatggcaagcttattatcctgataagtttatgtgctatggcaagttaatatcttcatttgttgataaatatattaagaacaaagatcttgtttcagataaagaagaggaatacaaagtctttaagggcaattccaaagattggtatgatattcccattccagataagatctctaaggaaaataatttagagttatatgatttccttgctaagcaattcagtaagaatatctataaacattggtccattttctctaagttgggagagtcattacctaggattagagatggatttatctcttcctctttggttgatcagacgcttttcctggaatgtttaattaattcattgcatcccggagaattcaactttaaatctgctcctgaaggattgctaaaattaaataattgtaagaaacaatctggtctgcttagaataaatcagtctttgggcccagggtttaagctatacgcacagtctcctactggcttctatgaaaacgttatatttgcgatagataagaatggaaatgaagtgagtactaagaaaaatggcgtttag

SEQ ID NO: 92 - DNA, 3618 bp, Unknown
  OMNI nuclease sequence
atgaagtataattatattttaggactagatattggaatttcatcagtaggatggggattactagcactagatgaaaataacaagccatataaaattattgatgtaggaagtagaatatttactccgggagaagttgaaaaaacaggagatagtagagcgaaagaaagaagagaaaaaagagggagtagaagagtaactagaagacgagaatttagacttgatagaataagaaacttactatatgaaagcaaactactgtctgggaatgtaagcagtagtatagtttccgaaaaaaataatgaactaacaatactatataacaacatgattaacaattattataaaagcaataatactaatccttatagattaaaagtagaagccttagatagaaaattaacagccgaggaattagctataatattggttcactatgccaaaaaaagaggatataaatcaaatagagaagaaagtaatgataatgattctggaaaagttctaagtgctatcaaggaaaatgagacaataatggctactaataattatcgtacagtttctgaaatgtatatcaaagatgaaaaatttaaagacaaaataaaaaatagtccaggtaactataaaatatcagttacaaatgaaatgtatttggatgaaataaacaaagttttagataaacaaattaaatttggtttaatcgatagtgaatttaaaaatcaatatctagaaatttataattctagaaggagttatgccaaaggcccaggaggaacatcgccatatggtggtgacttaataaaaaagatgactggaaaatgtatctttgataaggaaccaagagctccaaaatacgccttttcatccgaattatttgtagctatttcaaaattggtaaatttacgatataaaataggaaacgaaagttatcagtcgctagaaaatgctgcaatagtaaaattaatagacttagccaaagaaaaaaatattgtcacatataaagatttggtaaaggtgttaaataaagaaaatgtaaaaatcaaagacttgaacatgtcaatgaaagattcaaaagtaattgaagagttaagaaaaaaattagctatttcaaacgaacaagaaataaacatatacgaattatctgaagatgataaaaaaatatatgatagtatttataatgaaaaattattttcaaaaacattaatagaattaaagggttatcatatgttgagaaaagtaataactttatgttatagcaaggatatttggaatgaagttaaaaataatatagaatttttagacgaactagcattatactgtacaaattataaggtcaatgaagacataaaaaaagaaattaaaagttcaaaagtaatagattccagatttgaagaagatgatttcataaaggctttacctaattttaaagatcatctaatgctatcaactaatataataagaaaattgattccaatcatggaaaatggtattacttatgataaagccatgaaagaaattggctataatcattctgatctttctggaaagtttgaaaagaaagatttactagttccagtatatacaattcaaaatattactaatcaaagggtaattcgttctcttactcaagcaagaaaaattataaatgccttaattaaaaagtatggctcaccaaaaataattaacatagaaactgccagagaactagcaaagagtagaaaagaaagaaatgaaatagagaaaaatcaacaagaaagaaaagctaaaaatgaacaaataaaaaaacaactagtcgatttagaattgttctctgatattaataaaatctcaagcaatgatttattaaaatataagttatggcaagaacaaaaagaattttgtggttacagcatgagaaaaataaaaatagaagacttatttagaaacaatatagttcaaatagatcatattttgccatactcaaggacatacaatgataattacttaaataaaactcttgtatatacaaatgagaatcaagataaaggtaataggactccatatgagtggtttggaaaaacgagaaaatgggaaaactatgaaagttttatcaatagtttgtcaactgcccaagcaaaaaaagataattatttattaaaaaagctggattttgatacagaaagagaaatgcgagaacaaaatttaaatgatacaaaatacataagtaaggaattagctaatttaataaaggctcatttaaaagtagaaaaagtgaatacttatcctggagcaataacaggaaaattaagagcaaggtggggatttaacagattaactcatagttatatttctcaaacatatataatgccagaaagtatgaagagtgatataaagaaagatagagaaaatcacctacatcatgctatggatgctttagtaattgcctcaataacaccatcgctacaacaaaaaataactttatatgaaaagtttagtagatacattgatggagtagtaaagagtgaacttcgaaaaataaacatggaaaatatagaagaatcactaggagagttttatgatagtgaaacaggtgaagtaaaggaagtggaatttaaagagtatgtaagcgaacaattgtcacatggacacataagctttttgaaacatgacgtaagtaaattggagtttccattaccatacgaaaaatttgttaaagaagcaaagacaagagtttatgaacaaaatattgatatattaaaaagagatttgcagttactaggaacatatacaaccgaagaactagctaaagtacatactctgactccatcagtagccaagtctaaaatttctggaaaaatgcacgaagaaacttattatggaataaaagaaataaaagaagaagaggctactgtaaagtataaaactttaagaacaccaatagaaaaagtaaaaagaaaggatttagaattgataccggactgtagagctggttccaaagatatatacaatactttagtggactggtttgggactgcagaaaatggaacagaagcactaaaacaacatgaaggaaaatatccaatcaatcctaatgacaaagagcaaaaagaaattaaaagaataagagtatattcagaatacaaaggtataggacatgtaatcaaaaatagtaatgttgaaaaaggaggaatttatagagttgatatatatacttcacgtaatgaaaacgatgaaaaactatattttgcagcacatgacatatatgagattaaaaaaattaaagcctataaggataaaaaacatgaggacaagaaatttaaaattaaactggattatgggcaaggagaaaaatataagatcatagaatacgatgaactaatgaaagagtataacttaaaaatgagtatatataaaaatgatttaataaggataattttaaaggatggaagagaatcaattgcttatatggttggatgttcaagtggaatgattgaggttaaaagtaagttgggtgatggatatgatattattggaaataacaacatatttagcaaaaaaagagagagatatacagtaactttatcaacaatcagtaagatagaaaaaatatcaataaatttattaggtgaaataagtgggctatag

SEQ ID NO: 93 - DNA, 3180 bp, Unknown
  OMNI nuclease sequence
atgaataagattttagggttagatttaggaattgcatctttaggctattgcgtaattaatatagacgatgaaaattttgcggcaggggatatcctagcgacaggcgtacgtatctttgatgtggcagaaaacccaaaagacggcaactctttggctgccccccggagaaaagcccgttctctgcggcgtattttgcgtcgtaaagtgatgcgtattcaagccatcaaacaattgtttttagattttcatttgcttaccccacaagagctgaattttctctcccaacaagattttaaacgattataccgtgcagaccaacttgtaaacgggtacatccccagcgtgtgggaaatccgtgcgcgcggactggatgagcgccttccaatgcaagatatttgcagagcgcttttgcatattgccaagcgacggggattccgttctatgcgtaagagcgacaaaccttctggagaggctggaaagttattaaaaggagtggaggaaatgtcaaagacgcttcaagcgtcccatttccgtaccattggagaaatgctctaccacctccctaccacggaacccaagcgcaataaagacggcagctataaccattccattgccagggcactccttgaaaaagaagtccatctccttttgcaaacccagcgagacaagggagctgccttgctctctaaggaatttgaaaacaaattctgtgaactgtcttttagtcaacatccgttacaacccagtgatgcgggctattgcaccttagaaccaaacaaaaagcgggctcccaagcatgcctatacggcagaactctttgccgctttgtgcaaaatcaaccatatttatttagaagaaaacagccatagctatcccttaagtgccagccaacgcgcactagccttggaaaaatgcctttccacgcaaaaaacgaattacaaacaactgcgggaactttttaacctgccggatcatattaaatttaacattagctataccgccccggccaagaaaaaaagcaaacaaacggaaacaaaatcaccggaacaaatcgcccaagaggccaaagaatatgatgccgaaaaaaacactacactttacaatatgacagggtttcatgcgctcaaaaaagcgcttaattccatgcccctgtggacggaatacaaaaataatccaaacggaattttggataaaatagcagagatcttatcccgctataaaagcgacggggaaatcaaccaacatttaactgcgttggggcttgaggccgaagcggtggaaaagctccaaaatgttaattttagcggatttatgaatttatcattagcggctatgaataaaataattcctttcttaaaagaggggctcctctatcatgacgcttgccaaaaagcagggtataacttccaagccaccccgcaaaacaagggattatcaaaattgccgcccttaacggaagaggacggccatactataaccagccccgtggctaagcggagtctggcccaagcacgcaaagtaatcaacgcactcaataaaaaatacggcccatttgatgccgtgcatatagaagttgcccgagaaataggtaaaagttttgaaaaacgcaaagaaatagaagcaaatcaaaaagccaatgccgaagaacgcacgcgattaaaagaggtgggaatagacggtattatcccgaaaacagaaactgacttaaaaaaattgcgtttatggaaagaacaggaaggcttctccatgtacagccacacctacatagacccaaaaaaaattttagaagaaggattctgtgaggtggaccatattattccatacagcaagtcttttgataattccttaaacaaccaagtgctatgcttggcctcagaaaatcaagagaaaaagaattgtataccctacgaatattttcagaaccggaagacccaaattacttgggaagagtttgagggctatgtaaattgtcttaaaaatatgcgcatggccaaaaaacaccgcctcttaaagcaagaactaacgaaagaagacttacaaggctttaaggaacgcaacttaaacgataccaagctcattagccggtttatgaaaaattatttgtctgctaatctcaaattaaccggtaaatacaaacaaggtgttttttgtataaacggtcagcataccaacactttacgcggtttttggcgtttaactaaaatacgcgaagaaggagacaaacaccacgccttggatgccattgtgattgcctgctgcactaaccaactaatgaactatatttccacaaaatattgtcagggcagagaaatggagctcaagcgcaaagaagtagccgtcccatggccgtggcctcacttcaaacggacggttgaaaacgcccttttaggtatttttgtgtcccgcccccctcgtaagaaggtaaccggtcccttacataaagataccttctattctgccaagcatatagcaaaaggcataaaaaccttgcgtacagatatccaaaagcttacgatagaagccatcaaaaagcaacgggaattggaagttaaatattttggagtggaacgaaataaaccgctttatgacctcattgaaaaggcgctcagagcacggcccaatgacaaaacccccattgaggtgcagctgccgaccaaaaacggtgggggtgtccccgttcgccacattaaactaattaccgagagcaccacaggtgtcccggtgctgggcggaacggcccgggcagaaaacggtcccatgccccgcgtggatgtatttttggaaaacggcaaatactatttagtacccatctacaccatggattttgccaaaaggcagcttccgctggtagcacagccgtccggccgtcttatgaaaaaagaaaattttgtattttctttatataaagatgattatgtaaatgtagtcaacgaacaaggcgaaacatgggaagggtattttaagcagcttaatgctcaaactggccaaatttatttggaaagtcatgaccgttctgctaaatatacagtaagcggcaagccgtccaatcaaaagaaaatcgcaagtagcaccttaaaacttattgaaaaataccaaatagatatttttggcggaaaacatttggtcaaaaaagaaaaatatataggtattatccgcaaaaataaaggttttgggggctaa

SEQ ID NO: 94 - DNA, 3546 bp, Unknown
  OMNI nuclease sequence
atgaaatattgtttaggacttgatttaggcgttggttcaatcgggagcgcggttgttgaattagatgcacaaaataatcctgaaagtattgcagatgcaggtgtgcggatttttgaagtatctgaaggcgccatagatagaagaactaaaagaacggcgcgtaaaaatttgattcgcactaaaaaacgtttggagcttttagcgcaaaaactttttgaaaataatttgtgggtcagcgcaaatccggaagggacagataaccttaaatcaaaatctccgtataaaatcagatatgacgctttaaatggtaagcttgaaaatcagaattatatcgggcgcgcaattttacatttggcaaaacatcgcggagccgggtttgtttcggcatctgaagaatcggaagaagaagttttggaagaaggcgaaaagtctagaaagaagcccacagcgtatgagttgatggttaatcatttgaaagaaacaaattctcgtactatcggtgaatttttttataaacggattttagaaagctatgaaaaaaataaagaaaccggcgagcatgacaagataaaacttagaaccgtgcgtcaaaaatcaggtgcggtggattatgctattccgcgctatttggtaaaagatgaatttaagcaaatttgggataagcaagcagaatattttccgcaaatgcaaaaagacggcttaaagcaagaaatttatgatattttgttttatgagcgtccggcggctccgtatgcaaccggaaaatgtatttacttcagagatgaagacaggttgttaaaggcgcacccgctttccgaaatgcgccgcatttatgaagaagttaataatgtgtcggttttatcagatacgggcaagcgtcatttgacgatagaagaacgtgataaaattgtaaatgaattgttgttgcaaggcaaaaatgccggttgccaatccattaaaaaagttttgaatttatcagggcaacaaaaactttctattgatgaaaaagaggaaaaacaaaagccgataaaagcttatttgtattctcgtcctgaatttgctcaagtggattatattaaaaatttatcacaagatgagttgattaaatttactgagtttttgggtaatccgcttaatcctgaagataggcatggacggctgtataatgaagatgaagtgattaataaattaaagccgattttagggattgatgacgaaaagcaaattgcaaagttgctcacaatgctgcctaaagggcgggtgatgttaggcatttctgccacacaaaagattttagataaacttaaaacagaaactgatgaaaacgggtatgtgcttggacatcgcaaaattacagataagcttgccaaagaggataagcgttttatggcggcagaagaaattgcgcggcaaaatcaaggcaaatgttttgaattgccctattatggggagattttgcagacggatacacaatcttttccgccactgctgcttaaaaataatcacagcttgaatgaggatgaaaaacaatggggaaaagttgctaatccggcagtgcatatgattttaaaccaaattaagttggtggttaatgaaattgttaaaatatatggtcgcccgtatgaaattcatattgaattggggcgggatgtcgggctttcaactaagaagaaaaattctttggaaaaaatgcaaaaagccaatgaaaaactcaacgaagaagccaaaaaatatttattagagcataaaatttatgtaaatagcaaaaatatattaaagtggaaattggcgcaagagcaaggttgggttgacgcatataatccgacccaaaaaacgacccaaaaaattgatagaagatttatcggttttgaaatagagcatatcattccgcaaagccgaggcggaaccgatacatacaataacttatgtttggtgagccgcgctgataatgaggcaaaaggaaacgaatttgcttatgactattttgtaaaatcaaaaacgccggaaatgataagagctattttaaacaatgcgcgtactaagttgaaaaataaggcatggcgctttgaagctgacgcgcgtgaaaaatttgaagatgaaggcgataaagaagaaacgaatcggtatatgacagatactcgttatgtatctaaattggcggcacgttatttgcgagcaattgttgattgttcagccgatgatggcgttatagaaaatcggattttggcagtcaaaggcgggcagactgcagagttgcgcaaacgttggaatttgcaaggcttggaatatgatttaatgggcttaaatatcccgagatatattgattgcgcgccatattggcagaatctggaaaccggagaaataattgatggcgagcaaaagccggatattgacggtaattggaaattttatgattgtaaaaagaatccggagtggtcggctaaaccgcgtattgatcatcgtcatcacgctatggacgctattacggttgcgtgttgtaattggaatatgattcggcaaatggcaaatgaaactgatttacataaggttacagtgccgttgccgatggcaagtgtgcagtcggtaggagaatttcgccgcaaggtaattgatgtgttaaaagaggttaaagtttcgcataaaccggatcataataagttggggcagtttcatgaagaaactggtaaagtaaaattaggtataaatcctgataatccagataatttaattacggtttattcgcgcaagattttgcaggtagttaagacatataaagatttagataaaatgttgattccagatagtgttaaagatagttggcatgaagaaattgctgagaatcgggttagacaagcaaaattggttgctgattttaagcagtattggaatttagccgagcaaattttacttgctgaaaatgaaaaagatatggcagaaggtaaaaaggaacgcgaaattaccgaaggtttgattattgccaaaacttttcatattttattggataaaaaatttatgggtgaaaaagtatggaaaggtgataaatttaaatgctacgaaaatgtatcttcatatgtttatgtaagaaaacataatttagtttataaaagtggaaataatcactgtgtggatttttatgaaaaagacggcaaagtaggttgggaagttgtaaagcgttttgatgttaatcaggatggttttgtgccgcagtggaaaaaggatggtggcaagcttatttggtcagttcaacagcgcgatatgttggaattagatacccctgatgagtggaaatcatataccgataaagaacgctgtttagccaaagtgaaaaaatttagtgatggaaaattgactatagattatatggcagatgcacgtatgacggctcctaaagataaaactctgaaatatatgtttgttgattccgtttctgaaaaaggtttgtcgttttttataaaacataaagcgcggaaaatagaacttacgccgtttggaaaagttaagaaaaagcataaggtgttgtggaatggcaagaagacagcggcttga

SEQ ID NO: 95 - DNA, 3282 bp, Unknown
  OMNI nuclease sequence
atgaaatataaaattggtttggatttgggtagtacctcgttggggtgggctgtcgtagaactgaatgaagcagaccaaataacgagtttggttgatatgggggtgcgtatattcccagatgggcgagatgcgaagagtcacaagccaattaatgttattcggcgtgaacatcgtcagatgcgcagacgtggtgatcgcgtactgctacgtaaaaagcgtgtcttgcaattgattcataaatatggtctggatttcgatattagtgcagatatcaaattagaagatccgtatgttttgcgtgcaagggcggtttctgataaactgtcgtccgcagagttggggcgtgttctatttcatctggcattgcgccgtggtttcaaaagtaatcgcaaggaaaccagaggggattctggtggcaaattaaaaaaggcgacattggcattgcatgatgccataggtgataaaaccttgggtgaatttcaggtggattcaaagcgttatcggtttgcagatcaatttgatggtaataaaatcaaagatggtgctctttatccgacgcgtgatatgtaccttgacgaatttaatcgtatatgttcagtacaaaatatgtcagatgacatgcggcaacagtttgaatatgctatatttcatcagcgaccgttggtgccaccagaaattggaacgtgcatgtttgaattagatcagccacgtgcgtataaatttgaacctgtgtttcagcgttttcgtgttctgcaacagataaatcaattacgaattatcaacaatggcgaaataaaggaattgaccgcagaacagcgcgaaaagttgcaagatgctttactggctacattttgtggggtaaaacgtgataagtcggggcgtcccaagataacatttgcggaagttaagaagttgttgggtttatcacgtaatacaaaatttaatctggaatctgaaaagcgtaaggatatggatgttgatgcaacggcatttgcatttgctgaatgtgaattggcagatttctggcgtgcttgtacagataatgtaaaatcgcaggttttggcacatctgaatgatgatgaattgtccgattctgatttggtggattatctggcgcatgaatatggtatttcgcaagataaagcagaaaaattaattcagcaaccgtttgaagatggggttgcaaatttgtctgtgtgtgcaatgcaaaaaatgttgccgttcttggaacaggggcatttgtatcacattgcggcaaaagaagcaggttatgatcatgctgataggggaatagtgcatttagatacattgccatactatggcgatgtcatggctttacgtccatcgttggttcaagataagatggggcgttatcgtacgatgaatgccacggttcacattgcattgaaccagttacgcgcagttgtcaacgatttgattgcgcgttttgatggcgagccatatgcaataaatattgaaatggggcgtgatgtatcagctggtgcagatgaacgtgcagaaatagaaaaacaacaggccgcgaataagcgtgaaaatgaccgtattgccactgaattggtcgccatgggcgttcgggtttgtcgtgaaaatatacagaaatataagttgtgggagaatttgggaaaaagtccattggatcgtagatgcgtttatactggtgagataattagtaaggaaaaactgtttagcccagagtttgaaatagaacatatattgcctttttcacgtacacttgatgactcgatggcaaataaaacgatttctgcggccgttgccaaccggttcaaaggaaaccgtagcccagatgaagctttttcagacccaaagtcaccatggaaatacgaggatgtggttgcgcgtgctcaaaatttgccagatgctacgaaatggcgttttaatcgtggggcgatggatgtgtttctgcaaggcaaagagtgcattgcgcgtgcaatgaatgatacgcgatttatgacacgtatggcggtcacatatttacaacatgtgtgtgcagacaaaaatcgtgtgaacggtatgccagggcggttgacggctagtttgcgcgatgaatggcatttgaattggtggaagaataaggcggaagaatccaaataccgtggcaatcacattcatcatgcgattgatgcttttgtcattgcttgtactgatgagaacatattgcggaaactagctgatgcaaaatctgatatgcatacccctttccctgggtttgattattttgatttcaaaatgcggtgcgagaatactattatttcataccgtcaatctcaaaagaatccgaaagatgcacatagtacggttggatgtttgcatgaggatacggcgtataatctggaatgttttgaagatgggggatgtggcgtcaatgcggttatgtcgcatcgtgaagaactgcccacaacagataaagacaaaaaagcgtttgcaaaggatttcaaaaatgtgaatccgaaaacactgcaaatgtttttgaatgatgctggtgttgcaaacgaagaaccagacattgcaatcaagtttttggattggtgtgcaatgcgaaatatacgcaaggttcgtatgtataaaacgggggtcgatgttacgacatacgtgcctgtgttcagaactaaaaaacagcgtgacgtttaccgtgccgcgtatttgaattggtatgtaaatactggcgttgccagtggaattgtggataaaaaattgcgtgctgttcaacaagagaaagaaaaacacttgttgcaagaatttcaagatgctgccaagcaggcgtacaagtggtatgttggtggtaataatttctgtgcagagatatttgaaattcgtgatgatgatacccgctatccaaaattgcgtggtcgctggcaggtggagattttatctaattataacgcccaattaaatgctggtgcaccactgtggcgtcataaatatgccacagcaaagcgcataatgagtttgcgtataaatgatatggtaatggcggaattttccaaagacgatccaaaattaccaaaagggctggtggaaacagttgcacatcaatgtgcaatagagaaaacagataaagtaaatgttgtttttcgtgtaaaaaaattgaacagcagcggcactgtgtacctgcgtccacatttcattgccaaggaagatgctgatacaaaatcatggattgccagcgcaacatcgttacaggaacacaaagcgcgcaaggtttgtgtcagtccgtctggaaaaatattgggattaaaataa

SEQ ID NO: 96 - DNA, 3282 bp, Unknown; identical to SEQ ID NO: 95
  OMNI nuclease sequence

SEQ ID NO: 97 - DNA, 3330 bp, Unknown
  OMNI nuclease sequence
gtgaaatataaattaggcttggatttaggcagtacatcactggggtgggcggtcgtagaattaaacgatatggataatataacccgtttggtcgatatgggggtgcgtatatttccagatggtcgtgatgcgcaaagtcatacaccaatcaatgtagttcgtcgcgagcatcgtcagatgcgtcgtcgcggtgatcgcgtggccttgcgtaaaaagcgcacattgcaactgattcataaatatggaatggattttgatattcattcaaatgtttcgttggaaaatccgtatgcattgcgtgcccgtgcggttgttgaaaaattacaaccccaggaattgggacgcgttttatttcatttggcgttgcgtcgtggattcaagagtaatcgtaaagaaacccggggcgaggccgggggaaagttaaaaaacgcaacggtgtctttacaggtggcaatgggtgacaaaacgctggggcaatttcagtttgaatcgcacagatatagatttgcagaccaatttgatggaaataaaatcaaagatggggcgttttatccgacacgcgatatgtatctggatgaatttaaccgtatatgcgcagtccaggaattgccagataacgtacgaaaagaatttgaacatgcaatatttcatcaacgtccgttattgccacctgttattgggacgtgtatgtttgaacttggacaactacgcgcatataaatttgaaccagtgtttcaacggttccgcgtcttgcaacagataaatcaattgcgaataattgataatggtgtcgtaacggaattatcaggtgaacagcgtcagaaattacaagatatattattacggacgtttgatggtgttaagcgcgataaatcggggcgtgtaaagattacgtttgctgcggtgcgaaaaatgctggggttggcacgtggtgtccggtttaatctggaaaccgaaaaacgcaaagaaatggacgttgatacgacagcgttcgcgttctcggaatgtggtttatctgatttctggtatgcgtgtccagacgataaaaaatcgcaaatcttggcacgaataaatgatgatacgttaaatgacgatgatctgattgattatttggtggataaatgcggcctgaattcagatgtggcagcccagttgatacaacgcccgtttgaagagggtattgcgaatttatctgtctgcgctatgcaaaagatgttgccatttttggcgcagggtgatttataccatgttgcggcagacaaggctggatataatcatgctgataggggtgttgttcagatggcacaactgccatactatggagatgttgcagcattaaagccgtcattggttccagataaaaatggtgtatatcgcacaatgaatgccactgttcatattgctttgaaccagttgcgtgcagttgtcaacgatttgattgcacaatttggcagcgtgccatatgcgataaatattgaaatggggcgcgatgttcgtgctggggcgcgggaacgggccgagatagacagtcagcaggccgctaataaacgtgaaaatgatcgtatcgcgtcggaattggtggtgatgggagttcgggtcaatcgtgaaaatattcaaaaatataaattgtgggaaaatttgggcaagaatccactggatcgtcgttgcgtttatacgggtgaaattatcagtaaagaaaaattattcagtcctgaatttgaaatagaacatatactgccgttttcacgcacactcgatgattcgatggcgaataaaacaatttctgcggtggcggcaaaccgtttcaaaggaaatcgcagcccagatgaagcgttcacagactctaaatcgccatggcattatgatgatgttgttgcacgtgcacaaaatttaccgggggcgacaaagtggcggttcaatcgtggcgcaatgagtgcgttcttgcacgaccaagactgtattgcgcgtgcgttgaatgatacgagatttatgacacgtatggcggttacgtatttacagcatgtatgtgcagataaataccgtgttactggaatgcctgggcgcatgacagcgatgttgcgcgatgcatggcatttggactggtggaaagacaaggcggacgaagaaaaatatcggggcaatcatatccatcacgcgattgacgcgtttgttgtcgcgtgtactggggtggggacgttgcagcacttgtcgcgaaacgcgattgaaactgataaattatttggtaaaacccagaaagaaaaacgcagacagtggttcgttgatatgaatgtgccgtttgacggttttgattattatgatttcaaaatgcggtgcgaaaatacgattatttcgtatcgtcaatcccagaaatcacccaaagattcaaaaggaacaattggttgtctgcatgaagatacggcgtataacctggaattttttgaacgcggaacaactgcggttatgtcgcgacgcgacgcgttgccaaccacggacaaggataaaaaggactttgccaaggctttcaacaatgtaaatccaaaaacgctgcagatgtttttgaaagacacagggactacaaatgatgagccgaatatcgcaaataaatttttagattggtgcacattgcgcgatatacgcaaagttcgtatgtataagcgtggtgttgacgtaacgacatatgttcctgtatttcgcacaaaacggcaacgtgatacatatcgtgcggcgtatttgaattggtatgttgccagtggaattgccggcggtattgccgataaaaaaatgcgtttggcccagcaagaaaaagaaaaggctttgctgcaagaatttcaaaatgcggcaaagttggcctataagtggtatgttggtggtaataatttctgtgccgatgtatttaaaatgcgtgatgacgataaaagatatccaaaactgcgtggccggtggcaagttgaaattttgtccaattataatgcgcaactagatgcaggctcgccattgtggcgacgcaaatacgcgacggccgaacgggtaatgcggctgcgaataaacgatatggttatggcgacgttttccaaagatgacccaaaattgcccaagggattagtgaaaacggttatgcaccaatgcacaatagaaaatactgatacggtcaatgtaatattccgtgttaaaaaaatcagcagtaacggtacgatatatttacgtccgcattttattgccaaggaagagggcgatacaaagtcatgggccgccagcgcagcatcattgcaagaacataacgcgcacaaggtgtatgtcagtccatctgggaaattacaatgctcagaataa

SEQ ID NO: 98 - DNA, 3189 bp, Unknown
  OMNI nuclease sequence
atggattatattctgggtttggatttgggatcgacatctttgggatggagcgttgttgaattggataaaaacggcgttcccgtgcggttggaacgtatgggcgtgcgcattttttcggacggacgcgacagcaaaaccaaagaaccgcttgccgttgcgcgcagaacggcgcgggggatgcgcaaacgccgcgaccgctatgtgatgcgccgcgaaacattgatgaacaaactgataaaatacggtttgatgcccgaaaacgcatccgaacgcaaagccttggaacggttaaatccgtatgaattgcgtgtaaaaggactggatgaaaagttgtcgccccatgaattggggcgcgtcctgtttcacatcaaccagcgccgcggatttaaaagcaatcgcaaaaccgaccgcaaaaacgacgaagccggcgcgatgaaatccgccatcagggatttgaccgaaaaaatgaccgaaagcggcgcgcggactttgggtgaatacttgtataatttaaacaaagacagaaaatcgacacagaatttcgcccccgtccgcgtacgcacgcatttggaaaaaagcaaagccgtttattccatgtatcccacgcgcgaaatgtacgaagatgaagtgcgccaaatctttttaaaacaaactttaagcgatgaaatcaaagccgatttgttcaaaacggttttcgatcagcgtccgttgaaaacaccgccgaaaggcctctgtccttttgaaaaaagcgaagaacgatgctatatcgccttccccgattttcaacgtttccgcgcgttgcagcaaatcaaccagctgcgggtgcgcgacgattttaccgaagtcgaattggacgacaagcaaaaacgggaactgcgccattggttgctggacgatttttccaaactggacaaggattatcgcctgacattcgcggcgattaaaaagattttgaaattgcccaaaaacgttaaattcaatttggaatcggaacgccgcaaaggattggacgcggacaagacctccgcgcagctgcagcctctgttcggaacggtttgggcggaaaaacaggacgaaatcgtcgatttgctactgaatatggaaaacgaagacgaattgaagcaggctttgcaaaaatacggtttgaccgacgaacaaatcgaacaggtgctgaccgtaaatttgccggacggcacgggatcgctcagcttgaaagcgatcggtaaaatcaatccgtttttggaacagggaatgttgtacgacaaagcggtcgtcgcggcgggatatgtgttttcaaagaaattcgacaagctgcccgataaatacgaaacattcattgatcccgaatacggcaccgtttttgatgaattgccctattacggccaagctctgcccgaacgcgtcatcggcggaacgcataaagacgaagacaagggcgacgaggctaaatttttcggcaaaatcaacaacccgaccgttcatatcgcattgaaccaagtgcgaaaactggtcaacgttttggtaaaaaaatacggccatccgaattcaatcgtcgtcgagctggcgcgtgatctgaaactgtcgcgcgacgagaaaaaacgccttgaaaaagagcaaacgcaaaacgaagccgagaacaaacgaatcggcgatgaactggtgcgattaggcgtcaaaaacaactacgacaatcgtatgaaatacaaattgtgggaagattcgtccaaagatcccatacagcgatgctgcccgttttgcggcaaaccgattcccgcggcggaattggcgatgtcggcggaatttgaaatcgaacatttgctgccgttttcgcggtcttatctggatgcaagatcgaacaaggttctttcctgccgccggtgcaaccgtgaaaaagacaaccgttcgccgtgggaagcttttcataacgacgccaaacgttggaatgaaattctggcgcgcgccgaaaaactgcccgaaaacaaacgctggaaattcaacgaagacgcctttaaaaagctgcaagatgaaaacggcgacgtgctggcgcgaatgttgacggacacgcaatatatgtcgcgaatcgcgcggcaatatttgtgcttcgcggcaaatccgaaacgggtttacggcattccgggacaactaacatccaaattgcgcgaacattggggattaaactccattttaagcgaacagcatgaaaaagaccgcaccgaccaccgtcatcacgcgatcgacgctttcgtcgttgcctgcaccagccgcggaacattgcaaaaatatgcgacggaacggcgcgatttcggcgaaatgccgcaggaaaaagcaccgcacattcccttccccgcgttcagattggcggaaatcaaggacgctttcgataaaatcgtgatttcgcacaaacccgatcacggcaacccgcaaaaggcgatccggcaaggcaaaaccgtcgccaaactgcacgaagaaacatattacggcatgatcggcgatggtgagaaaaaaggaaccgtgcgtttaacaaaaagagttccttgtttggcgtttacaaagtcgttcaatcctcaaaagaaaccgtataaggtggaagatattgtcgatcaaagcggaacggcgaacaaaattcgggaacgattggaaaattcagatcccgcggattatgaaaagatcgttatggaatactttaacgaaagaggcatgaagcacgttaaagtgtttgaagaccgaaacaaaaatgttgttttggcgttcaatgacagaaagacgaagcaaccgtaccgttacgcgatttacggcggtaacgcgtatgccgagatttactgtcccgaccgcggcaaaaacgcggggaaatggcaaatcgaaatcataccgaattaccgcgcccaccagaaaaattttgtaccgaactggcggcacatggacgcgcacgccaaactgattatgcgtctgcacatcgacgatatggtcgcttatgaagaaaatggaaaaactgttatcgcacgcgtcaaaaagatgacgagcggaaaaatttattttagagaaaacaaaatagccaaagaagatggagattctaaatcttgggcggcttatccatcaggaatgcaggaaaaaaatatgagaaaaataaccgtcacagttgacggcgttgtccttgattcaaaacgtccgaaaggcggcgctgatggatag

SEQ ID NO: 99 - DNA, 3054 bp, Unknown
  OMNI nuclease sequence
atgcggatatttggttttgatttaggggttgctagtattggttgggctgttgttgacatagacaaggaaaacgataatccagaggcgggacgggccgctattggaaaaatacagcaatccggggtgcgcatttttagtaaagctgaaagtacagatggttcttcgttggcggcacctcgtcgtgaaaagcgactggttcggcgtgccttacgcagaaaagcgctgcgaatgaaagaaattcgcgcattgttagaaaatagcggactaggtagccagaatatcgttgttaatgctgatgatattgatgtctgggctttgcgcgcgcaagacgctttttgccgcaagttgtcggcgcgtgaactatcgcgtgtattgattcatatggcgaagcatcgcgggtataagtcaatgcgtaaatccgcagaggaaaacgataaagaaacaggaaaagtactcgtttcaattgctcggaatcgcgaaagtatgggcgaatataaaacaatggctcagatgatttataagagtaattgtgatggggcgagaaaatatcgtaatggtgacggagtatatgataattcaattccgcgcgaagaaatagaacgagaactgaattatatatttgatgcccagcagaaatatggggtttttactgaagatttactagaacaatacaaaaaaattgcatttcgtgtacgcccaatacagtcggttggtaaaatggttggtttgtgtacgttagagccaaattgtctgcgtgcgccaaaagaatccccaacggcggagttatttgtggcgttgactaagataaataatatgaaaattgttatagatggtgaggtgcgttctgtggatgacgcagaacgggcagctatattagaattgctaagcaagacgcaaacggttaaatataagacactacataacaaaatatggaaggggaaagatgttgtttttcgtggtgtcaaagaagaatctcaagatttttattccatgacgggatggcataaactaaaaaaaatcatggatgaggccgatatggctgatacgcgaatgcttgaccggattatgaaggttgttgccacccagaaagatgacagtgccatagaaaaagaattgcgccgcaagaaggtaccagaaaagtatattgtcgaattaaagaaactatgtacgtccaagttcataaatctgtcgttacaggcactgtataaaatagttccagaaatgatgcgtgggttgacgtatgataaggcttgcgatggggcgggctatgattttaaaagtaaagtctctggagaagtaaaggctgacaatggatgtatcgcagagatttcagaatggacacatgtcccggttgtaaatcgtacggtcgcccaatttcgcaaggtttataatgcgctggtgcgtaaatatggtataccagaccaagtaaatttggaagtcggtcgcgaattaaagaataattttgacgaccgtaagaaaatagaacgtaaacaaaacgaaaatcgcgataaaacagaaaaagcccgagcagagtatgaagcattaatcagccgcaaagtcacaactaaagaagttttaaaatacaaactttaccaagaccaaggcggaaagtgtatgtattcgggtgaatcaattgatttagagcatctggataactatgaagttgaccatattttaccgtattcgcggtcattggataattcttatatgaacaaaattcttgttaaatatacagaaaaccagatcaaaggcaacaaaacgccatatgaatattttggcaatactctacgatgggatgatttcgttgtacgcgtatctgcaaccaagaccttgggggcacgtaagatttataatctgctgaataaagattttgaaacaacagaagatgattttcgcaaacgtaatgcaaatgataacgcctatgccgcccgatatgttagacaggtattaaataccgcatttccagacctgcgggttgacgtgcgtgctggggcattgacgcattatttacgtggtcaatgggggttggaaaaatcacgtacagaatcggacaggcatcatgcccaggatgcaattgttattgcctgtgcaacgccgggtatggttcgttacttatcaacgatatccggattgtttgaaaataaacgtaatgagaaaggtaagccgtggtggaataatttgaaacaaaatattcaagagccgtgggctggtttccgcgcggatgtttttcggtctgttgatgacgtttttgtttcgcgtacggtgcgtggcaaggcaactggttcggtgcataaagatacgattaattcaccaaaatctagtaaggggagtttaattttaccgcgtgggcgagctgataaagaaaacatgttccgtatggatgtctttaagaaagacgggaaatatgtggttgtgccaatatttgtagcagacacagttgataaaaagcgtcaagatatattttatccgcaaccggctaaggcagaacattcggttgcaattgatggtacgtatgaatttgttatgactctgcacaaggaggattatattaaaatcgtaacagtggacgataaagtatatgaaggatatattattcagtgtgatatgccgcgcgggaagtttgttttcagaaattctgataattctgcagtattttctgttaaaacagatacgtttgagccaggtgattttattgttatagatggtaatttgtgcaaggttatggattatttggcaggtaaattgcgtgctctatctccgaacggcattgttgaagaagtagaggcggtaaaaaagcaaacgcgtaagggtaaacaaatacaaactattgataaatatgaaaaacgcagtaagcagaaaacaataaacataggtacggttaagaatctgcaaaaatttcagattggcgtgttaggcgacatgtcagaggtaaaatctgggcatcgtgcacctgtttgtgctataaaattgcaatcagaaaaaagaaaaggaaggaaacagccaaaaaggaataaaaatgggttggcgaatccttcaactaacgaaaccatgtaa

SEQ ID NO: 100 - DNA, 4416 bp, Unknown
  OMNI nuclease sequence
atgaagaaaatccttggactcgacttgggtacgaacagcattggctgggcagtggtgaatgaggcagaacatgtcgatgaacagtcgtcgattgtgaaaataggagtaagggtaaaccctctgacagctgacgaactttcgaagtttgaggaagggaaaagtattacgacaaatgcctatagaacgctaaaacgaggaatgcgacgcaatttacaacgttacaaactccgtcgtgaacatctgctggcattgttgaaggaaaagggttttatatcagaagagacaattctgtcggaaagtggaaaccggacgacgtttgagacttatcgtttgcgggcaaaggcagcaacagaagaaatttcgctcgaggagtttgctcgggtacttctgatgatcaataagaagcgcggatataaaagcaatagaaaggcaaagaatacagaagagggccagctgatcaatggaatggaaattgccaaaaggctataccaggaaaatttgacacctggccagctttgttggcagttgctgcaggatggaaagaaatccttgcctgatttctatggttctgatcttcagagtgaatttgataaagtgtttgagttccaacggcaatattatagtttcttgaccgatgagttgaaaaaggagttgtctgggaaaaacgataaagcggtatgggctatttgcgcaccatcgaaagagaaggagtcttctgacgagaagtttgtttggaagtgggtggagactgtaacggaatgggatgaagagacatctgccaatcagactgttgagaaggtaaaaacactggaaggactgaaacgagaggggaatacagcggagaggaagagagaaaactatgagtggagaagccgtgcattggaggaacaattatctccagaacaacttattgtggtctttcaggagataaataaacagatcaataatgccagtggttatttgggaaacattagtgaccgaagcaaggaactctattttacgaaacagacggttggacaatggaaaatgaagaagttggatgaggacccaaaccatagtcttaaaaataaagttttttaccgccaggactacctcgacgaatttgaaaaaatatgggagacccaagcgaaataccatagcgaactgactcctgaactgaaaaaagaagttcgtgatattgtgattttctaccagcgtccgctcaagtcacaaaaaggattgatatcaatctgtgaactggaagggaaacagatggagttcgaaaaggaagggaaaaacaaacttgttaccataggaccgaaagtctgcccgaagtcatcaccgctctttcaggagttcaagatatggcaacgattgaatgatgttcaggttgtaaatgcagaaggagagagacggtttttgaatcagaatgaaaagaatgtgcttttcgaagaactcaactacagagaaaagttgtcgaaaacagagacgcttaaacttttgtttgataaaaaacacaaggaatacgacctgaactttgaaggattggatggcaacaggactcagtcagagttgttcaaaacctatcagaaaattatcgagatgactggacatggagaatatgatttctccaaaatgtcagctaaggcgaaagtggaattggtgacggagatttttgaagggttaggatttaataccgagattctgacatttgattcttcaatcaaggacaagaaagaattcgaacagcaaccattctatcaattatggcatttgctctattcgttcgagggagataagtctgttcttgggaatgagaaattgatagaaaaaatatcagagatgtatggctttgacaaagagtctgcgacggttctggcaggggtgattttccaaccggactatggcagtatcagcgcgaaggcaatacgaaaaattcttccggatatgatgaggggggataattatagtacggcatgtgaaaaagctggatataatcattctaagcggtcactgaccaaagaggaacttgagaaaaaagtatggaaggataagctggatcttttgccaagaaacagtcttcgtaatccggtggtggaaaaaattctgaatcagatgatcaacgttgttaatgcggtcgttgatgcgtacgggaaaccagatgaaattaggattgagttggcacgcgagttgaagaaatcggctaaagaacgtgatgaactgacaaaggcaattaacaatacgaaaaaacagcacgatgtttatacgaagaagttgcaggaggagttcggactgacccatgttagccgcaacgatattatacgatataaactttacgaggagcttcggtcaaatggatatcggactctgtattccaatacatacattccacgggaagaattgttcagcaaaaaatttgatattgaacatattattcctcaggcaaagttgttcgatgattcgttttccaataagaccatagaagcaagagatgtcaatatcaaaaaaagtaatatgacggcatgggactatgtcgttttgacaaataatgaaggatatgcgaataatgaatacaagaatagagttgagaaactgtttgccgataagataattagtaagtccaaacgtgacaaactgctgatgagggaggtggacattccgagcgatttcataaatcgtgacttgcgggattctcagtacatagcaaagaaggcgagggagatactggaaggaatggtgaaattcgttgtcccgacaacaggaagcataacagatcgtctgcgtgaagattggcagttggtggatgtgatgcgtgaacttaattgggacaagtacgaccgcttaggcatgacgtattacgaacaggaccgtgacggacgacagattccgaagattaaggattggacaaaacgaaacgatcatcgtcaccatgcaatggatgctttgacgattgcttttacaaaacggagtttcatccagtatttgaacaatttgaatgcgcgcgtccaaaagggagttgatgagtggatagatttggatactgttgaactgtccaaattggataaagaacagcgcacctctgttgtatatgcaattgagaagaaagagctctatcgtgatagtcatggcaagttgcgtttcaatccgcctaatttgaccaataaccgagatatagaacaacaactgtctcaattccgtagggaagcaaggcgacaactggaaaatgtgctcgtctctattaaggcgaagaacaaggtcgttacccgcaatgtaaataaagcaaagaataagtctggggaatacaaaatgcaactgacccctcggggaaaattgcatttggagactgtgttcggaagccagaatagatatgttacgaaagaagaaaaagtgaatgcgtctttcgatgccgaaaagattaagacggtagccgtaaagcgctatagggaggcgcttgtcgcccgactggcacagtatggtggcgatgcaaagaaagcatttactggaaagaatacgctggataagaatccggtgtgggttaatgcacagcaaagtgagaaagtacccgaaaaagttaaaacagtagaatttgagaagatttacaccatcagagaggaagtaacgccggatctgaagattgacaaggtggtggacgctcatattaagaaaattctgcagaataggcttgcggaatacggtggcgacgcaaagaaggcattctctaatcttgaagaaaatccgatatggcttaacaaagaaagaggaatttctatcaagagagtaactattgaacggatgggtaattatattgctttacatgacaaaagggataagaatggaaacttgactctggatgagaacggaaagaagttgcctgttgattttgtaagtacagggaacaaccatcatgtagcaatctaccgtaagccagtgttggataagaatggactgcctgttttgaacgagaacaacgaagtggagtacgagttggatgaaaagattgtctctttctatgaggcggcatcacgggcaatgcttggcttacctgttgtggataaggaatatagaaagtcagaagggtggcaattccttttcactatgaagcagaatgagtatttcgttttccctcgctatgagtcctatattgacagcgaaggaaaggaagcgcaacgtatgatcttcaacccgacggaatacgatgaggcttggtataagaacccggaaaattatgctttgataagtccgaatctgttcagagtgcagaaattctcatataaaaattatgtatttcgacatcacttggaaacaaccattgatttgagtgaatacaatctgcgaggaactacatgggtagactttagaagttcgaaatggttagataagatccttaaggttcgtgtaaatcatattggtcagattgtatcagttggagaatattaa

SEQ ID NO: 101 - DNA, 4554 bp, Unknown
  OMNI nuclease sequence
atgcttatgaagaaaattcttggtcttgatttgggaacaaacagcattggttgggctgtgatcggggcagagtcggagaaacgtgatgatggctcagagtatctgaaacctgaaagcatagaaatggcaggtagcagaataatccctatggatgcttcaatccttggcaattttgatgcaggtaattcagtatcgcaaacggcagatagaacggggtatcgtggaacccgtcgtttgagggagcgctttctactgagacgtgaaaggcttaacagggtgcttgatttgatgtcattccttcctgaacactattcaagccagttggacagatatggcaaattcatatcacctgatattgaaccgaaactggcgtggaaaccttcaattgacggaaaaaatgaattcatttttatggattcgtttttggaaatgcttgctgacttcagacaatatcagccagaactggtaaaggaaggcagaaagataccattggactggacaatttattatttgcgcaaaaaagcactgaccagacccatatcaaatcaggaacttgcttggattctgctcaatttcaatcagaagagaggttattatcagttgcgtggagaggaggaagaggaaaacccaaaacagaaagtggagtattactctttgactgttgttggggttgaagattctggtgataaaaaaggttcggatatatggtataatgtccacttggaaaacggatggatttatcgccgttccagcaaatatccgcttgattgggtagataagaaaaaggatttcatagttacgacagcacttgacgacaatggcaatccaaaaacagataaagatggaaatgtaaaacggtcattcagggcaccaaaagacgatgattggacccttatgaagaaaaagacagagatggatatcgatcagtctggccatactgtaggtgaattcatatatgacagtctgctggcaaatcctgatcagaaaatcaaaggaaaactggtgcggacaatagaacggaaatattaccgtcaggaacttagccagattctgaaaaaacaacaggaattcaataaaaaactccaggacaaagaattgtacacacgttgccttgaagaactgtaccccaagaatgagttacatcgtcgctgtgtttccgtcagagattttgcgtatctgtttattgatgacatcatcttctatcagcggccgttaaaaagcaaaaaatcgcttattgacgattgcccatacgagaaataccattatttggacaaaggtgttgatgttttccgtcccattaaatgcgtgtcgaaatcgcatccattgtatcaggaattcagattgtggcagtttattgacaacctgagaatacttgaacgtacaaaactgattgacggccggttgcaatctgatgtagatgttactgcccagttcctgaaagacaatgatgattacgcagcattgttcgactttctgaataataggtcaagtgtcaaccaggatgtacttctgaccaaatacttcaatatcaaaaagcccagacagaaagatgcggtaataccttataggtggaattatgttgaagaaaaggagtatccgtgtaatgagactcgttctgctatgctcgcaggattcaaaaaggcaggaataccccaggaagtattgactacagaaattacagaagcgctatggcatattctctattcaatcagtgacaaacaggaacttggaaaagctttggataggtttgcggaaaagaaccggctggacaagtcttttgttgatgttttctccaaaataaaaccgtatgacagttcgtatggcgcatattctgcaaaggccatttccaaacttctacctcttatgcgtaggggcaaatattggaatttgaatgccattaatccgggaactaggcaaagaatggaaaaaatcataaacggcgagtttgatgaatcaataagtagcagagtatgggaaaagtctgcatcgctgaaaactgagactgattatcagggactgccgttatggcttgcatgttacgttgtatataacaggcattcagaaacaggtgaaatagtcaagtggaatacgccaaatgacattgatgtataccttaattcatttaagcagcattcattgcgtaacccgatagttgagcaggtggtgctggaaacgcttagaaccgtacgtgatatctggaaaaagactggcagcattgacgaaattcatgtggaactgggccgtgaaatgaaaaacccggcagacaagcgtgcccgcatgtcacaacagaatattgccaatgaaaacacaaatttgagaatcaaatcattgttagctgaatttgcaaatcctcagttcaatattgaaaatgtcagaccatattcacccacacaacaggatattctcagaatttatgaagattatgctttgtcgtcattgaaagcggacgatcaggattatgagttcatacacaaaatgtctatgaccgcccaaccttctcacaatgatgtggtccgatataaattgtggctggaacagaaatacatttctccatataccggtcaggttattcctttggcaaagttgttcacatcggcatacgaaattgagcatataattccccaatcacgatattttgatgattcattcacaaataaggtgatttgtgaatctgagataaacaaactgaaagacaaacagttaggatatgaatttatcaaaaaccatgccggccagaaggttcaaatatcccaaacaggacagttcgttgaggtcttttccataccagcatttgaggaatttgtgaaacaacattattccggtccgaaactgaaaaagctgctgatggatgatattccagaccagttcattgaaaggcaaatgaatgacagcaggtacatcagtaaactcataaaaggacttctgtccaatatcgttcgtgagaagacagaaagcggagattatgagccggaagccatatcaaagaatctgattccgtccaatggtcagataacagaccgtctgaaaaaagattggggcgtgaacgatgtttggaattcaatcattcttccaagatttgttagaatgaatgagattacgggaactacaggctttactgctatcaatcagaaagggcatgtaatacctgccatgccgcttgaactgcagaagggatttaataagaaacgaatagatcataggcaccatgctatggatgccattgtgattgcttgtactacacgtgatcatattaacttgctgaataatgaggcggcactttccaaaaaccagtccaaccgctatgctctgtccagaaaactgcgtcgttatgaaagtgtccaaatagagaaacatggagagaagaaaactattgaagtggcgagggaattcctgttgccttggccgacttttgcaacaaatacacgctcagcgctagacaatattgttgtcagtttcaaacagaatcttcgtgtaatcaacaaagccacaaacagatatcttcattttaatgaaattggagtcaaggttaatgaaaaacagacaataggaaacaatatggcggttcgaaagcctcttcacaaggatactgtttttggaatggttaatcttaaactcaaaaaacaggcttcgttgaatgatgcattaaaggccccttccatgattgttgatcctgccataaaggaacgcgtccacaatatgaaggatgccggttttgacacaaaacaaatcaagaatgaacttgagaaagatggctcaattagtggaaaaattgaagtatattatttctcgaacggtacgaatgaacgctattttgctacaagaaagcctgttgattccagttttgatgaaaagaccattttgggttctgttactgataccggcgcgcaacagatactgctagctcatttgtcaagatgtaacaacgatcctgaaattgcattcagtccagatggtattgaacagatgaatagggacatccgtcaattgaatggcggccatgaccataagccgattttcaaggtgcgcaaatatgaaaaggctgataagtttgctgtaggccagactggcaacaagcgttccaaatatgtggaagcagccaaggggacaaatctgttcttcgcaatatacaggactgaaacaattgacaaggaaacgggacggactgtatttggacgagcttttgaaacggttcctttaaatgtggtgatagaacgattgaaacaacatctggctccagtgccggaacaaaatgaaaacggtgacagattgctattctggttgtcgccgaatgatttggtctatgtacctacacctgatgagattgaaacgggacatatttcggaacctattgataagagaagcatttacaaaatggtcagtagtagtggaccacaatgtttttttattcaagaatcaattgctactccattggttaataaggtcgaattttctcctcttaataaaatggaaagatcaatttgtggtgcgatgatcaaagagtgttgcattccgatgacgattgatagactaggggaaatttcttttaagcaatga

SEQ ID NO: 102 - DNA, 4419 bp, Unknown
  OMNI nuclease sequence
atggataatattttaggaatagacctgggaaccaattctataggattgtctttacgaaacactaacttcaatggaagtattcagaatcaacttgaatactttacatccatcatatttccttctggtgttggaaaaggtaaaagtggtgaattttcgtacgcagcagaacgaacgaaacatcgctcctctcgccgattgtatcaagcacgtagatataagaaatggaaaactttaggccttctcattgagaacgattactgcccactatctatggaagatttggaaaaatggagcaaatatgataaggctaaaggattaaaacgtcaatatcctattcatgcaaccaactttgagcagtggatacgattggatttcgatggagacggaaagcctgattatgcaaatccatatgaactgagagccgagttgatggagaagcagtttgattttacaaaacagaccaatcgatacaagttaggtagagcattgtatcacatagcacagcatcgtggtttcaaaagtagtaaaggtgaaactataaaggagcaagaacaaaatgaaaaagacaatatacaagactttgatttggctgaagctctaaaaaagtcagaagaaaaaaaatctggaaaactttcagaatacatgaaaaaatacaatcttcctaccgttggttgtgcctacgcacatttgaggaagaatggtattcgtgttcgcaatagcatataccaagcagtacgttcacaatacaaagatgaaataaaacagatttttgaatatcaaaatggattagataagaatagcgatttctataaaagactattgagtgagaagaagggagaaggaacaatcttctataaacgaccattgcgttcacaaaaagggcaaataggctattgcactcttgagccaaacaagccacgctgccctatcagccatcctgaatttgaaaagtttagagcctggtgtcttattaataatatcaggtttggtgaagatttaaaagagacgctcacacttgaacaaaagagggaactattccacgaacgattcttactgacacgttcttctttcaaatttgaagaaataaggaaatggatagaacgagaaacctttatgcgcctagattataaagcaaaaaccatcaactacaaagacaagacaaacgtttcaggatgtcctatttctggccggctgaaaaatcttcttggcgaagactgggaaaaatggatgtgtaaaactggcatcacgaaagtaataaagcaaaagaaagatggaaaatatacagaaaggcaagttgagattgggtattcttcatatgatttatggcatatttgtttttcctttgatgaaccagagaatgttgagacatttgccaaagaaaaactgcactttgacgataaacaagcaaaacaacttgtgcgcatatttttcgctattcagcaaggctatagcatgctgagtcttaaagctataaagaatataaatcgtttcttagaagaagggctaatatattcggatgccgtattattagcgaaactgcctgacatttttaaggacagatgggcaattgaaaaagatgcaatcgtttcacaaattgaccttgtcatagaaaataatagaaaacaaaaacttctattcaacatcgtaaacacgctaattgcaaactacaagtcgttgggctatgacgacgaaatacaattcaacgaacgttttgctgaccataacactacttacaaactccagccatcagattacaatgacatcaaaactgttacaatcaaagctattggcgaaaaaacttgggctaagaaagacgaagaaaagcaaaaggctattttggaacaagtagctgtcctataccaaaacttttttgcatcagagcaacgtgattactacaaattaccaaaagtagctgacgatttagctaaactgctacacgaaaaatataattttctacaagagaaagatttgaagaagatctatcatccgtctatgatagaattctatgcatctgcaaaagagcagcaccttgacgatgggagatggatgaaactccttggtagccccgtcattggtgcatttaaaaacccgatggcaatgcgagtcctgcatgttctcaaaaaacagattaatgaactattgaaagcatctttaataaatggtgaagaaacacgcattgttgtagaaactgcaagggagctcaatgatgcaaatatgcgttgggctattgaaacatatcaaagggaaagggaagcagagaataaggaatacgaaaaaattctaaatgaatatttcccgaaccgcaatataaatgataaagaaatagagcaagcaaggctgatgtgtgagcaacacgacatacctgaaagtgatattttacaacaaaaagaaaaaatagataaagacaaaactctgaaatctcttatctacaaaaaagatctaaccaaataccgtttatggttagagcaaggatgccgttgcatatatacaggtaagatgataaatattacaaacctattcgatgagaatgcttatgactttgaacacacaataccaagaagtctgtcatttgacgattccttggcaaacctaaccatatgcgatgcccattataaccgtacgataaagcaaaaccaaatgccaactcaacttgctaattatgataaagatgctaatggttatacagctattttgccacgtcttcaaccttggattgacaaagttgaacgcttaaaagacaatgttgaattctggaaaacgcaatcaaaacgtgcacaagacaaagacaggaagaaccaatgtattcgtcaacaacatctttggaaaatggaattagattattggaaagccaaggttgatcgatttacgatgacagaggtaacttctggctttagaaataatcaattgaacgatacccgattaattacaaagtatgcttatcactatctgaaaacggtattcaacaaggttgatgtacaaaaaggtaaaataacctctaatttcagaaaaatccttggagttcaaagtacagatgagaaaaaaaatagagataaacattctcatcacgctatagatgcgactattctaactatgattccatctgctgctcaacgcgataaaatgcttgaaattttttataagattcaagaagaagagaaattgcatagagacacaactgttttaaagaaagaactgaataaagagataaaaaaatgtaatttaccaacaaatgtatccttaatcgctccatttattgaaaacaacatactaatcaaccatgtttcaaaggaccaaacacttacacctgcacacaaacgcaagcgtataagaggcaaaattgttccattaagagatgcagatgggacaatcatatatgaaacaaatgcggatgggactgtaaaaaagaataaatacgggcatcccataccaaaagctaagcaatggattacgggtgatagtatacgtggacaattgcataaagattcattcttcggggcaataaaatacccgataatagataaagaaggaaaaccaacaagaaaaaatggctcattcatttatgagaaagaatctaatggccaagacgtcatatcgatggttatgcgtgtacccataacaagtttcactaaggaagacgaactaaagaaaatcgtcgatcctactattagagcatctatcgccaagactattgcaaaaagaaaagaagaaggaaaatcttttaaagctgcaatagaagaacccatttggctattagacaaagatggtaatgaaataaaaatagataagaatgggcttcccatatcacctatcaggcatgtccgttgtaaggttgcagcaggacggggattctttacaaaagataaggctattgaagttaaggagcaaacttatccttcaaagtatccatacaagaatatatactatgcacagaatgatggaaactacttatgtttgctgtacgaaggagttaagaaagggaaagtcgtgagacagtttaaattcataaactattttgaaacaatatcacttggtataaaaaacactaacagtctatacagtgagccatatttccagaagattgaagatagaaaaactgaattaaaactatccgcagtcataaagactggaacacacatactaatgtggaaagatagtccagacgaattagaaagcctaacaaacgaacaattaagtagaagattgtttgttgtatataaattcaatttaaaaggtgcaaactgcatatatcttgagaaccatcttgaagcacgaaatgaaattccccaaaaagaagactatacaatttttgacactacaaaataccaagctagattaaccttagtcgcaaatggtttcaattgcctaattgaaaatcgtgacttcaaaatcaatgcaataggtaatatcgaatggttatga

SEQ ID NO: 103 - DNA, 4506 bp, Unknown
  OMNI nuclease sequence
atgaaacgaattttaggactcgacttagggaccaatagcattggatgggctgttgttaagagtgaaaatgtagaaggtaaagacgtactaacgggtattgagggagcaggtagccgtatcatcccgatggatgctgctcagttaggcgacttcgataaagggaacactcagtcgcaaaccaaggatcgcacccattttagaggagtacgtagaattcgggaaaggagtctcttgcgacgggaaaggcttcaccgcgtcttggacgtaatgggatttctccctcaacactatgccgaggcaatagaccgctatggaaagtttgtaaatcacgaagaacccaaacttgcatggacgaaagacgaaagcggaaaaatgaagttcctgtttgaagactctttccgagaaatgatagcagagtttcgtactgccaatcccgacttcttgaacgaaggaggaaaggttccctacgactggactatttactatctgcgtcagaaagcgttgcatcagcccatttcaaaggaagaacttgcttggattctgctcaacttcaatcagaagcgcggatactatcaactacgaggtgaagaagaagaagacaacaagaaacgatcggaatattgtgcactgaaagtcctatcagttgaagacaccggcgaaaagaaaggaaaagacacatggtacaacgtacatttagaggggggtcttatctatcgacgcacaagtgccatgcctctcgaatgggaaggacagaccaaagaattcatcatcaccaccgaatatgacgacaatggaaatccaaaggaagacaaggaaggaaacataaaacgttcgttccgaatgcccaaagacgatgactggtctttgctgaaaaagaaaaccgagtccgacatcgagagcagtcaggtttctgtcggccaatatatctatgccgcactactcaaaaacccgaaaggtaaaatcagaggaaaactagtccgtaccatcgaacgaaaatattacaaacaggaactaaacgacatacttcgttcacaagaacggtttcatccggaactgcgcgacgcggatttgtattcgcgctgcatcaacgaactatacggctccaacgagtcatacagaaaaagtattgcagcgcgcgacttcgtctatctgttcgtcgacaatattctcttttaccagcgcccactgaaaagcaagaagtcactcattgacaactgccctctcgaatcgtaccattgccacgctcaggacggagacgttcagaaagcacccatcaagtgcatagccaagtcggctccccttttccaggagttccgcctttggcagttcctctcaaacctgagaatctaccagcgcgaaaaagaagttaacggcaagttgttgacggacgtagatgttacaaacgagttcctctcctccgaagacgattatgtccgcctgtttgaatacctgaacggcattgaaacgataaaacaagacacccttttgcaaaaacatttcaatgtccaaaagccgaagggaaaaaatgccaaactcccctatcgatggaattatgtggaagatcgcgagtatccggccaataagacaaggggacagatgctcgcattcttgaaacgggcaaatatttctgcaggctttctcactcccgacatggaagagcgtctttggcacctactctattccatcgacgacaagcaggaactgcacaaagcacttgccacctttgcctcccgacacggactggcgcagaccttcgtggaggaattcgccaagttccccccgttcaagaaagagtatggcgccttttcggcaaaagccatcaaacgcctcttgcccctcatgcgcatgggaagccgatggaatgagaaagacatcgacgaagccacacaccagaggatagacaaaatcatcgacggagagtgcgatgaaaccatacgcgacagagtgcgcgaaaagtccatacacctgacggacatccgtcagtttagcggactgcccctctggctcgcttcctatatcgtctacgaccggcacagcgaagccagcgaaacggctcgttgggaaacccccgacgacatcagccgattcctgcaagaattcaaacagcactctatgcgcaaccctgtggtcgaacaggttgtgaccgaaacgcttcgcaccgtgcgggatatatggaagcaatacggcaacatcgacgaagtacacgtggagttaggacgtgaaatgaaaaaccccgccgacaaacgtcgcaaaatgacagagcgggcacttgaaaacgaaaataccaatctccgcatcaaagccatccttatggaactgatgaatcctgacagcggagtagaaaacgtccgtccctactcgccttcgcagcaggaactgttgaggatatatgaagaaggtgtgctgggcagcgaaagaattttgcctgacttcgtggaggagactttggcgaagttccgccagtccgactcttccaagtgcccttcgcatgccgaggtgataagatacaagtgctggctcgaacagaaataccgttcgccctatacgggagagtccatctccctcgcacggctcttcacccccgactacgagattgagcacgtcatcccccagtcacgatatttcgacgactcattccaaaacaaagtgatatgtgagtcggaagtaaataagctgaaaggcaatctgctcggatacgagtttatagagaaacatcacggagagaaagtcaccctcacgggaggcaaagtggtgacagtcttcgaagtgcctgcctatgaacaattcgtgaaagacacctatgcaaacaatccgagcaagatgcgcaatcttctgcttgatgacattcccgacaagttcatcgaacggcagatgaacgacacacgctacatcagttcctatgtgaaaaccctgctctccagtctcgtgcgctgcgaaggagaacaggaagcggtgtcgaaaaacgtgattgcctgcacaggaggagtcactgacagactgaaacacgactggggcgtaacagaagtgtggaaccacatcattttgccaagattcgagcggctgaacgacatcacgggcacgcaggaattcacggcaaaaagtgcaaatggtcataccatccccgccatacccctcgagttacaaaggggattcaacaagaaacgcatcgaccatcgccaccacgccatggacgccatcgtcatcgcctgcgccaacagaaacatcgtcaattatctcaacaacgagtctgcgcgaaagggcgcagccatcagccgatacgacctgcagcaaatcctatgccacaaggaaaagaacgacagcggcagccaatgggttgtcaacatgccttgggaatcattccctgccgatgtgaaggcgacactcgaaaacatggttgtaagtttcaagcaaaacctgcgcgtcatcaacaagacaacaaaccactatcaggtcatagaagatggcaaaaaggttgtaaagacacaaaccaaaggcgacagttgggccatacgacgctctatgcacaaagacaccgtcttcggagaagtcaacctcaagcgcatcaaggaagtgggcatcaacgaggccttcaaagagccccagcgcattgtcgacaaagagctgaaggcaaaaatgctggcaatgaaacaactcggcttcgacctcaagcgagtgaagcagtattttgaagaggagaaagacacatggcaggatgtgaacctgaagaaaatccccgtctactactttaccaaagagacgaacgaccgattctttgccacacgaaaagctcttgacgagagtttcgacgaaaacaagattaaaaaccacatcaccgatacaggcatacagaagattctccttcgtcacctcgcagccaacggaaacgaccccaagctggcgttttctcccgaggggatagaggaaatgaaccgcaacattgtcgcactcaacaacggcaaatcgcaccagcccatctacaaggtacgctggtacgagaagtctgacaaattcgcagtaggcacagcagggtgcaaagccaagcagttcttcgaagccgacaagggaacaaaccttttcttcgctatctatgaaaaagaaactctcggtgaggaccatcgcgttgtccgcacccgctcctatgcctccattcctctaaatgaagtcatcgaaaggcagaaaaaaggacttccctctgctcctgaaaacgaagaaggcatgcaagccacatacgtgctctcacccaacgacctcgtatatgtaccccggcaaggagaggaaataacggatgtcaaccaaatagacaaaaaaagaatttataaaatggtgagttgcactagtggtgaatgtcatttcattccatatcaggttgctaatataattgtgaacaaagtggagttttccgcgaggaacaagatggaacgtgctattacaggcgagatgataaaagagatttgcattccaatcgaaattgatcggttgggtaacatccgattgaaccgttcatga

SEQ ID NO: 104 - DNA, 4473 bp, Unknown
  OMNI nuclease sequence
atgtcgaaaatagtaggacttgacttaggtactaacagcatcggatgggctgttattgacaacgaacagaaacagatagaagccgccggttcgcgcatcatccctatggatgcagcccgtctgagcgactttgagaaaggtaattctgtgtctcaaaccgccgaccgcacgaaatatcgcggcatgcgccgtctgcgggagcgctatcttctgcgacgagagagattgctgcgggtgctatcggtcatgggattcttgccagagcattatgcctcacaactcaaccgctacggccacttacccgaggacaatgagccccgcattgcatggcgagaggggaaagacggcaagcccgagttcctcttccgcacatcgttcagcgagatggtcgatgagttccgcaaagccggaataggccaaaacattccctatgactggacaatatattatttaaggaagaaagcccttacactccccctgacaaaagaagaactggcatgggtgctgatgcagttcaaccaaaaacgcggctacaaccagctgcgcggcaaggctgacgaaagtatgggcgacgataccgacaagggggaagagaaagaatatcatgagctgaaagtcatcaaagttgaagagactggcgacaaagacaagaaaggtgtctcttggttcaacatcgtattggagaacggttggatataccgccgtgtgtttagcatcgcacccgactgggaaggcaaagtgcggggattcatagccaccttcaaactggacaaagagggcaaccgcaaggagggagagcaacctcgactcaagtcgcccgacgaaaacgactggggcctccgcaaaatcaagacggagaacgacataaagcaatcccaatgcactgtcggcgaatacatatacaaaacactgctgaacgacccgacacggaaaattctcggcgagaccgtccgcactgtagaacgtgaattgtatcaagaggaactgcacagaatcttggagaagcaacgcgaattcattcccgagctaaacgacaaggaattgtacaaccgttgcatcgaagagctgtaccctgccaacgaggcctactgcaacagcatagccaacaggggttttgtctatctgctggcggatgacatacttttctaccagcggccgctgaaatcaaagaaaagcctcattgccgactgtccctatgaatcgcgcaatggcaagcccatcaagtgcattgccaagtcacatcccgcatatcaagagttccacctgtggcagttcctgtccaacctgcaggtctatcaagacgacacaaaaatcacctccaccctgctacctgacggcaacgcctatgccgacctctacgaccatttggccaagcaaaaagagatagaccaaaacggtctgttacgttatttcaagattggccgaaaagaggtttccaagtaccgttggaactatgtgcaggatcggaaatacccctgtggcgagactcgcgccgtgttgttgggcggattgcacaaagccggtattgacgaaaagttcctgacacccgagaaggaacttcacttatggcacattctttactccattgacgaccagcggcaatacgagaaggcgctgaacaccttcgcccgaaaacaggggtgggacgcacatcaatgcgaggcttttgtccaaagtttcaaacggctgacattatgcaaggagaaggactatggcgcctattcagccaaggccatcagccggctgttgccagtgatgcgacgggggcgttgttggaacgcagaggagattgacacccagacgcgggaacgcattgaacaccttattactgccgaagaggacgagggactgacgacctccgtgcgcgagaaactcaaacacatacgcagcatcgaagattgccaaggtttgatgacatggcaagcctgctatctggtgtatggccgtcattcagaggcggctgaggcgcagaaatggactcgtccagaagacatcgaccgatacctcgaagaattccgccacaattccttgaacaaccccgtggtcgaacaggtcgtgaccgaaagcctccgtgtggtacgtgacattttgcgacagacggggcgcatcgacgaaatacacatcgagttggggcgcgaactgaaaaagaccaaggcagaacgagaaagcctctcgcgcaccatcttggagaacgagacaaccaaccaacgcatccgcaaattgctcaccgagctgatgaatccggaatgccaggtggagaatgttcgtcccaattccccctcgcaactggagttgttgaagatatacgaggacggtgcaatgaacagtgtggccgatgtccccgaagaaatcaaagaaatacagaaacgcttctccgctgccaagaaccagcccacccatgcggaagtcatgaaatacaaggcctggttggagcaacactacatatcgccgtatacaggaaaattcatcccgttggccaaactgttcacccccgcctaccagattgaacacatcatcccgcaaagccgttggtttgacgactccatgtccaacaaggtaatttgcgaggccgaagtgaacaaactgaaggaccgcgaacttggacatgagttcattgttcaccaccacggcgaacgggtgccgttgagcatgggtagagatgtcgaaatactttcggtcgatgcatacgagaagttggtcaaggacacttttgccaacaaccgaaagaaacgcgaaaaactgctgatggacgacattcctgaagatttcgtcaatcgacaattgaacgacagccgatatatcagccggttgatgatgcacctgctctccaacattgtccgtgccgaagacgaagatggcaaccaggaagagtccacaacatcgcgcaacgtcatcccctgcaacggttccatcaccgaccgcctgaaacacgactggggtatcgacgacgtgtggaacagaattatactgcccagattcgagcggctgaacaatatcaccaataccccagtctataccgccacgacggaaagaggccatcttatcccgcaagtacctcttcacatgaggcaggggttcaacaagaagcgtatcgaccaccggcatcacgccatggacgccatcgtcattgcctgtgccacgcgcgaccatgtcaacctcctcaacaatgaggcggcaaggagttccatgcgctacgatttgaaccacaaattgcggataatggattactacttgggggctgacgggcaaaagcatgaacgtttcggcgagttttacaagccctgggagacattcacagaggatgtacaacgctcattggaaggcattatcgtcagtttcaaacagaacttgcgagtcatcaacaagacttccaaccactataccatcatccaagacaacaagcacgtcaacgtaaagcaaaagaaaggcgacagttgggcaattcggaaaccattgcacaaagaaacagtgtttggcgaggtaaatctacaactgacgaaacgcgttcccatcaagaaagcccttgaagacatcaacagcattgtcgacagggagctaaaagagatgatcaaggcgaagaaaaaactcacccataccaacaaacagattgaggaattcctcgtaaagaacaaagacatctggagcgaggccgccgacggcaagattgaagtgtactactacaccgccgacaccaacgaccgctactttgccacacgcaaaccccttcttgatgtgatgaaagacatcgccactgaacctgcggcgcaaaaggccatcgacagcatcactgacagtggcatccgttccatccttcgtgcccacctgggtgccgaaaacaacaatcccgcagaagcattctctgccgacggtctggaacggatgaaccgcaacatcaaggcactcaacggcggacatgaccacttgcccattaaaaaggtgcgcgtatacgaacaggcaaacaagttcagcgtggggaataaggggcagaaagccacaaagtttgtcgaagccgccaaggggacaaacctattctttgtcatctacaccaatagcaatggcactcggggatatgccacagtacccctcaacatcattatcgaactgcaaaagaaatacgaaaaagactgggaggctcatcttgctgagcgcctacaaggagaagacctgcagttgatgcctaaaggtgcaaaacttctgtatgtactatcacctggcgatttggtgtatgtgccaacggaagaagaacataaaaatggtattgagaatgttgacacaacgaggatatacaagtgtatatctgccacagaacgaacttgtttgtttattccatattctgtcgcctcaataatccttcccgggaaggaatatgaagccaaaaacaaaatggaacgtgctataacaaaagaaatgattaaagaagtctgcatccccattcaagtagaccgactgggcaatatcacaaagattggataa

SEQ ID NO: 105 - DNA, 4698 bp, Unknown
  OMNI nuclease sequence
atgaaagagaacacaacaaacagtgcgaaaactattctaggactagatttaggcacaaatagtataggatgggctttaataaagcatgacttcgaaaagaaagaaggagatattctcggtttaagcagtagaattattccaatgtcacaagatattttaagcgcatttgggcaaggacagaaagtatctcaaactgccgatagaactggatatagaggtgtaagacgtttgtatcagagagataatttaagaagggagcgtttgcacagagtattaaacattcttggttttctaccaacgcattatgctgataacattgattttgaaaagcatttaggacagtttaagaaagaggtaaagctgaattatagaaaaacgaaagaaggtactcatgagtttctttttatggattcgttttatgaaatgcttcaagagtttaaaaaaacaaacccttcattgttttataaaaaagagaatggcgaagagactaaaatccctctagattggacaatatattatctacgtaaaaaagcattaactgaaaaagtaagtaaagaagagcttgcatggattcttctcaattttaatcaaaagagaggttactaccaattaagaggagaagaagagatagaagatagcaacaaaaacaaatcttttgaagaactgaaagtcagcagagtagttgatactggagaaacaataaagagaagtggcgaggctctatatgatatctatttcgaaaatggttggaaatatgataccaaaacaacaaaacctgacaattggttaaataaaacaagagagtttatagtaaccacttctacattgaaagatggtacagtaaaacgaagctacaaagcagttgattcggaaacagattggatagcaataaaagagaaaaccgaacaagaaatagctagatctaataaagaggtaggcgaatatatttatgaatctcttttagccaatccaactcaaaagataagaggcaagctaataagcactatagagaggaagttttacaaaaaggagctaaaagctatattagagaagcaaatagaactacatgatgaattgaaagatagagcactctactacgcttgtatcgaagagctgtatcctcgcaataatgctcatagaaacagcattaaagacaatggtttcgactatctatttatagacgatataatcttttatcaacgaccattaaagagtaaaaaatccaccatctccaactgtcagtacgagcacacaacatattggcgaagaaataatgaaacgggtagtttagagaaggtgagaaaacctttaaaagctattcctcgttcgcatcctttgtttattgaatttagaatgtggcagtttttgagaaatttaaagatttacaaacaacaagctactagcgatattgatgttacagataagtttctcgaaaatgagaacgattggtgtgacctgttcgattttttaatgaatagaaaagatgtacagcaaaagcaacttataaaatacttcatagataacaaaaccatagataaatctaaaagcgaagagtatcgctggaactaccccgaagatgcaacatatccaatgaatgatacgaaggctcaatttgtatctcgtctaaaaaaagtaaaagattttgatttaaaagaagatctctcattcgattttcaaatgaacctttggcacattatctactctgtaaaagacaagcatgagtttgagaaggcattagaaacatttgctctaaaaaatgatattgataaagatagttttgttgacagttttaaaaaccatccaccttacaattcagaatatggagcttactctttaaaagcaattaaaaaactactcccattaatgagggttggtagatattggaatagagacgatgttttagaagaggcaagcaatcgtattcaatctatagtagagcgcatagagcatttgcaaatagacgataataaacccctaaaagatgacaaactaaaagaggcaatagctgcagtgtctgacgacgaagtgccaaagcagtttatccgtagttttcttccttttaaaaataaaaatccgttgtcgggcttgaatacttatcaagcatgctatgctgtttatgaaagacactctgaagtgagcgatatatcgcagtggaagtcgcccgaagatattgacaactatttagctgattttaaacaacactcacttcgtaatccaattgtagagcaggtggtaacagaaacattgcgcacagtgcgtgatatttggatgcactttggagaagaggggaagagattgtttaatgagattcatgtagagattggtagagatatgaagaacactgccgatagacgtaaaactctatcggatagaaatagagaaaacgagcgtactaatcaacgtattaaagagctgctacaagagttgcaaagtgaatattcacaacaggatattcggccctactcaccaagccatcaagagatactaaaaatttatgaagagggtgtttatcaaaaccctcgcgcctcttttgatgtgttgagtgaagacgaagtgagaaaaatacgcaactcaaacaatttaaagaaaagtgatattactcgctataaattatggttagagcagggctacatctcgccatacacaggcagaattattcctttaagcagattgtttacagaggattatcaaatagaacatattataccacaagcgcgattttttgacaattctttgggcaacaaagttatttgcgaaagcgaaataaatccatcgccctataagggaaatcaaacagcaatggagtttattaaaagaatgggaggttcggtagtacagctaaacaatggtagaggtacaatgagaatatttaaacaaaatgaatatgaagaacattgtaaaaattattttcgccaaaacagaagaaagctagagtttctattaattgaagatattccagaacggttttccgaccgtcagttaaacgattcgcgctatataagccgttttgtgaaaggattgcttagcaacatagtgcgggaggaaaatgaaagagaggcaacatctaaagcattgctaacaatgcctggtgctgttactgccaaattgaaacacgattggggtttgaatgataaatggaatgaattgattgctccacgttttatacgtctaaatgagatgaccaattcaaatgattttggattttgggataatagtatcaatgcttttagaactcaagtgcccgatgagatagaaaaaggtggatttgataaaaaaagaatcgatcaccgtcatcatgccatggatgcccttacagtagcatgttgcactagagagcatgtgcaatatttaaatactttgagtgcaggaaaggataaatatgatttgcgagaaaaattattaataaaaaacgaacatggacactacactaaaacatttcaattgccatggaggagctttcctgcagatgctaaaaactcactagagagggctatcattagctttaagcaaaatttacgagtaataaacaaggctaacaataaaacttggcagtgggtaaaagataaaaatggcggctttaaaaaagagttggtaaagcaaacaaaaggtgatagctgggcaatacgcaaatcgctacacaaagaaactgtgtcgggcgcagtgcagataaaacgaataaaaaagggaacagctacattaaactactaccttgatagaccggaacttattgtggataaaaaaataaaggaaaaagttatttatttacatggtgtctttcttggtgatctgaataagataaaaaaacatctcagagaacatcctttaaaaatagatggaaaggaaataaacaaaattaaagtgtatgaatggacagagggagctacagcaactcgcactcctttgtctgacaagcttacacgcaagcagttggattcgataaccgattgtggaatacagagaatactaaacaaccatctaaaaaaatatgttgatgaaaatggtaaagagcaatttagtttagcttttagtcaagagggtatagaggatatgaacgcaaacattgttgcactaaacaatggtaaaaggcacaaacccattcgcagtgttcgcatatacgaagagggcaaaaagtttccggtatcggataataaaaacagtgctaaatcaaccaaatatgtggaagcagcaaagggcacaaatcttttctttgctatatattgggacgaggagaaacagaaacgtgtgtttgaaacaattccatttaacgaagtggtagagcatcaaaaacaacgtgcaactttaagcaaagaggtgatgaaggacaccctatatattccagtaaagccagcacttggagagtttattttttcgctatcgcccaacgatttggtgtatgtgcctacagatgaagagatggcaaatccgagccttgttgatattgataatctgactagaaagcaaattggcagaatttttactgttaatgatttttctggacctacaatatattttaccccaaactcactagcaaataatataactgcaaaagaggttgatttaaagatagatgaaaaaagcggcaagctacaaggttcttttgatacaaaaaccgcaagttttgaatttgtcccaataaaagacacgtgttggaaaatgaaggttgatagactggggaatattgttagtataattagatga

SEQ ID NO: 106 - DNA, 4311 bp, Unknown
  OMNI nuclease sequence
atgaaaaaaattctgggattagacctcggcaccaacagcatcggctgggcggtggtgaatgaagctgaaaatgctgacgaacaatcgtctatcgtaaaactgggagttagggtaaatccgctcactgttgacgaactgactaattttgaaaaaggcaaaagcattacaactaatgccgaccgcactctcaaacgcagtatgcgtcgcaatttgcaacgctataagctgcgtcgtgaaaacttaattaagattctgaaatccagtggttttatctctaacgacaccattttatcggaaaatggcaatcgcacaacctttgagacataccgattgcgtgcaaaggctgccactgacgagatttcgttggaggaatttgcgcgtgtgcttttgcaaatcaacaagaaacgtggctacaagagcagccgaaaggcgaaatcgaccgaggaggggcaactgattgacggcatggaggttgccaaacgcctttacaacgagaatttgatgcccggtcagttgtcgctggagttgcttaaaggtggcaaaaagtatcttcccgatttctaccgttccgatttgcaggctgagttcgacaaggtttggaacatacagaagcatttttatcccgaccagctcactgacggactgaaagacgaattgcaaggaaagaacaaaagccagacatgggcgatttgcgccaaaccattcggcattgtcggcatcaaacgcactacaaaaggctttgagcagaagattgaaaatttccaatggcgttgcaaggctctttccgaacaacttggattggaggaattggctatcgtacttcaagaaatcaacggccaaatcagcaatgcaagcggttatctcggcaacatcagcgaccgaagcaaggaactatatttcaatcatcagacagtcggtcaataccaaatggcgcagttggacaagaatccgaactacagcctgaagaatcaggtcttctatcggcaggactacctcaacgagtttgagaccatctgggaaacgcaggctagatttcataaggagttgaccgccgaactcaagaaagagattcgcgatgtggtgattttctaccagcgtccgctcaagtcgcaaaagggattgatttcgttctgcgagttcgagagccggcaaatagaagtggaagtcgatggcaagaagagacagaaaaccatcggattgcgtgtctgcccaaagtcatcgccgttgttccaagagttcaagatttggcagcggctgaatgacgttgaagtgtcgggaatgataatacctaatcagcaacaggacctatttggatactccaaagactataattatggcaagcgctggttgttgcctgaagaaaaagagcttctttttgccgagttgaactacaaagagaaattgtcgaaggctgaagcactgaaaatgctcttccctcatcagaaagaagttgacatgaacttcaaggagttggacggcaaccgcacgcaagccgagttgttcaaggcatatcaagccattgccgaaatgagcggacacgatgtgggagatttacagaaaaaatcagcaaaagaaatgcagcaaagcatttctgagattttcgatacgataggtattgacactcgcattctgaccttcaattccgaccttgaaggaaaagattttgagcagcaaccaatgttccgactgtggcatctattgtactcgtttgagggtgacaattcatccattggcaatgaaaaattgattgaaaagttgcacggtacgtttggctttgaaaaggaatacgcaacggttcttgccaatgttgttttcaaggaggctggcgattatagtagtctgagcaccaaagctatacgtaagatattgccgcatttgaaagacgggaacgactacagcgtggcttgcgaatatgcaggttatcgccattcaaagcagtcgctcaccaaggaggagattgaaaacaaggtgctgaaagacaagttggaacttcttccgcgcaacagtctgcgcaaccccgttgttgagaagattttgaaccaaatggtcaatgttgtcaatggcatcatagaggaatacggcaaacccgatgaaatccgtatcgagttggctcgcgaactgaagaagtcggccaaggagcgcgaggaactcacgaagtctatcaacgaaacaactcgtctgcatgaggaattggtcaagaaactgcaaaatgaatttggtctgtcgcatgtgagtcgcaacgacattattcgctacaaattatatgaggagctgaagaataacggttaccacacactctataccgacacttacataccacgcgaaaaactcttcagcaaagagttcgatattgaacatatcattccgcaggcaaaactattcgacgactcattctcaaacaaaactttggaagcacgtcaagccaatctggacaagtcgaacactacggctttcgattttgtagccacaaaatatggcgaagatttcgccaatggcgattacaagaatcgcattgacaagttgttggatgacaaagttatcagcaagacaaagcacgacaaactgctgatgaaagaagctgacattccgagcggcttcatcaaccgcgacttgcgcgattcgcaatacatagccaagaaagcccgtgagattctggaagagcttgtgcgctttgttttgcctacaacaggcagcataaccgaccgcctgcgggaggattggcagctggttgacgttatgcaggaactcaactgggacaagtacaaccaattggggctgaccgaaatcatcgaaggccgagacgggcaaaggatacgccgaatcaacgattggacaaagcgcaatgaccatcgccaccacgccatggacgcacttacgattgctttcaccaaacgctcattcattcagtatctgaacaatttgaacgctcgtgtgcaaaaaggtgttgacgattggattgaccttgacatggttgaatttgccgatttgaacaaagaggacaagaccaaggctgtttatgccatcgagaaaaaggaactctatcgcgacaaccgtggcaaattgcgcttcaatccgccaatgcctctcaacgagttccgtgccgaagccaaacgacagttggagaacaccttgatttcaatcaaagcgaaaaacaaggtggtgacgcgcaacgtgaacgtcacgaaaaagaaatcgggcaagaacaaaaaggtgcaactcaccccgcgcgggcaactgcatctggaaaccatctatggcagttcgaagcgatatgtcaccaaagaggaaaaagtcaatgcctcgttcgatgccgagaagataaatatggtggcaagcaaccgctatcgggaggcgttgatggctcgtctgaaccaatttggcggcgatgctaagaaggcgtttacaggcaaaaacgcattggacaaaaatccgatttggctcgatgagttgcataccgcccaagtaccggaaaaagtaaagactgttgggtttgagacgatttacaccatcaggaaagaggtttcgcctgacttgaagttggacaaagtagttgacgtgagtatccgcaaaattctggaagacagactgaaagaatttggtggcgatgcgaagaaagccttttccaacctcgatgaaaatcccatctggctcaacaaggagaagggtattgctatcaagcgtgtcaccattacgggcatcagcaatgccgaagctttgcacgacaaatgcgacaaagatggcaatctcttgcttgatgaaaatggcaataaacagccaatcgattttgtgaataccggtaataatcatcacgtagctatttaccgtaagccgaaattggacaagaacggccaacctgcactcgatgaaaacggcaacatcatgtatgagcttgacgaaaagatagtttcgttctacgaggctacttcacgtgccatgcagcatttgccaataatcgacaaagagtacaaacgcgaggaaggctggcagttcctgttcaccatgaagcaaaacgaatactttgtcttcccgcgctacgatgccgatggtaatatgacattcaacccattggaacacgatgaggcttggtacaagaaccctgaaaactatgccgcgataagtccaaatctgtttagggtgcaaaaaatgacaaacaaagattatttctttaggcatcacttggaaacaacggtgcaagacaatgcgaaattgaaaggtattacatggaagcgttttggattaaatggtattgaaaatatcctcaaagtccgtgtaaaccacattggacagattgtttctattggcgaatactaa

SEQ ID NO: 107 - DNA, 4329 bp, Unknown
  OMNI nuclease sequence
atgaagaaaattcttggattagaccttggaaccaacagcattggctgggcggtggtgaatgaagcggaaaatgaaaatgagaaatcatcaattgtaaaattgggtgttagagttaatcctttgacagttgacgaattaacaaattttgaaaaaggcaaaagtattaccaccaatgccgaccgcaccctcaaacgcagtatgcggcgtaatttgcaacgttataagctgcgccgtgaaaatctgattgagcttctgaaagcaaaccattttattgatgacgacactgttttgtcggaaaatgggaatcgtactactttcgagacttatcgcttaagagcaaaagctgcaactacagaaatttctttggcggaatttgcccgtgttttgctccaaatcaacaagaaacgcggttataaaagcagtcgtaaagcgaaatcgaccgaagaaggccaactgattgacgggatggaaattgcaaaacgcctgtatgatgaaaatcttacgcccggacaattgtcgttggagttgttgaaatgtggcaaaaaatatttgcccgacttttatcggtctgacttgcaggcagaatttgacaaggtttgggatgtacaaaagcagttttatccagaattgttgaccgatgagttgaaagaaaatatacgagggaaaattgcatcgtcaacaaaaactatttgtgagaaatgtttttgtgtagaaggtataaaaacaactcgaacacaagaatataaaattaaatactatgaactacgtgtaaaatctatttcgcaaaaaataagtttagatgaaactgctttagtactatccgaaatcaatggtcaaatcaacaatgccagcggctatttgggcgacatcagcgaccgaagcaaggaactctattttaatcatcagaccgttggtcaatatcaaatgtcgcagttggacaagaatccaaactacagtctgaaaaatcaggttttctatcgccaggattatctgaacgagtttgaaaccatttgggaaacgcaagccaagtttcacaaggaactcacgcccgaactcaagaaagaaatccgcaatgtggtcattttctaccagcgtccgctgaaatcgcagaaaggattgatttcgttctgcgagttcgagagccgacaaattgaggtcgaggtcgatggcaagaagaaactgaaaaccgtcggctgccgtgtgtgtcctaagtcatcgcctttgttccaagaattcaagatttggcaaaggttgaatgatgttgaactgacgggcatgattgttcctaatcagcaacaagacttatttggatactccaaagattacgcatatggcaagcgtcgcttgttccctgaagaaaaggacatgctgtttgccgaattgaactacaaagagaagctttctaaagcagaagctttgaaaatgctttttccgaagcggaaagatgttgatataaactttaaagagttggacggcaatcacacgcaagccgaacttttcaaggcatacataagtattgccgaaagaagtggtcacgatttgggtgacatgtcgaaaaaaacggctaaagagatgcttgattgcattgccgatatttttagcacaattggcatagatactaacattttaactttcaaccccgaccttgaaggaaaggaattcgagcagcagccaatgtatcaattatggcatctgttgtattcttttgaaggtgacaattcaaatttgggcaatgaaaaactaattgaaaagctattcgacaaatttggttttgagagagagtatgctgccatacttgccactgttgtgttcaaagaagctggcgattatagtagcctaagcaccaaagccatacgcaaaattttgccacatctcaaagatggcaatgactatagtgtggcatgcgaatatgctggttatcgtcattctaagcagtcgcttactaaagaagaaattcaaaacaaagttttgaaagacaagttggagcttttgccacgaaacagtttgagaaatcctgtggttgagaagattctcaatcagatgattaacgttgtaaatagcattattgacgaatatggcaaacccgacgaaatccgcatcgaattggctcgtgagttgaagaagtcggcaaaggaacgtgaagaacttttcaagtcgatcaacgaaacaacccgtatacatgaagaattggtcaagaaactgcaaaacgagttcggtctttcgcacgtaagtcgcaacgacattatccgttacaaattatatatggaattagcaagcaacggatatcatacgttatataccgacacttatataccacgcgaaaaactttttagcaaagagtttgatattgagcatattatacctcaggccaaattgttcgacgattcgttctcaaacaagactttggaggcacgacaagccaatttggacaaatcgaacacaacggctttcgattttgtagccacgaaatatggtgatgattttgcaaatggcgaatataagacacgcattgataaattattagcagacaaagttatcagcaaaacaaagcatgataaactcttgatgaaagaggctgacattccaagtggctttataaaccgtgatttgcgcgattcgcaatatatagctaagaaagctcgcgagattttagaagagttggcgcgttttgtagtcccaacaactggcagcattaccgaccgtttacgcgacgattggcaactcgttgacgttatgcaggaactcaattggaacaagtacgaccaattgggcatgaccgaaataatagaatgtcgtgacggtcaacgcattcgacgtatcaaagaatggacaaaacgcaacgaccaccgtcatcatgcgatggatgcattgaccatagcatttacgaaaagaagttttattcaatatttgaataatctcaacgccagagttcagaagagtgttgatgattatattgatttggatatggttgaattgtctgatttaaacaaagagaaacgggcatcagccatgtatggcattgagaaaaaagaattatatcgcgacaatcacggaaaattgcgtttcaatccgccgatgccgctcaacgagttccgcgcagaagccaaacgacaacttgaaaacactttgatttcaatcaaggcgaagaacaaggtggttacacgcaatataaacgtctctaaaaagaagtcgggagtgaacaagaatgttcagctaactcctcgtgggcaactgcatttggaaacaatttatggcagcagcaagagatatgtaacaaaagaggaaaaagtaaacgcatcttttgatgcaactaagattcagatggtgtcaagcaaacgataccgcgaagcattgctggctcgtattaaccaattcggcggtgatgccaaaaaagcctttactggtaaaaatgcattggacaaaaatccaatttggctaaatgcgcagcataccgacaaagtgccagaaaaggtcaagattgtaggttttgagactatctataccattcgcaaggaaatttctcctgatttgaggattgaaaaggttgttgacgctcatattagacaaatacttcaatctagattagatgagtttgggggtgatgcgaagaaagccttttccaatcttgacgaaaaccctatttggctcaacaaagacaaaagtattgcaattaagagagtgacaattacaggcatcagcaatggtgagcctttgcatgacaaacgtgacaaaaacggcaatctgattcttgatgaaaacgataatccgcagcctgttgattttgtcaacacaggcaacaaccaccatgtggctatttatcgtaagccgaaattggacaaaaacaaccagccgattctcgataataatggcaatatgcagtatgagcttgacgaaaaaatcgtatcgttctacgaagccacatcgcgagccatgcagcatttgccgataatagataagacatacaaacaagaagaaggttggcaattcctattcacaatgaagcaaaacgaatattttgttttcccacgctatgatgccgacggaaacatgactttcaacccattggaacacgacgaagcatggtacaagaatcctgaaaactatgcagagataagtccaaatctgtttagggtgcagtctatttcaaaagttatgtatggcaataatgctgttcgtgattacatattcagacaccatttggaaactacggttacatccaagttaaaaggattgacttatcaacaatataaatcattggtttttgctgacaaaatcgtcaaagtccgtgttaatcacattggtcaaattgtttcaataggagagtactaa

SEQ ID NO: 108 - DNA, 4185 bp, Unknown
  OMNI nuclease sequence
atgagcaaaatcttgggaattgacttaggcacaaactctattggtttggcaatcagagatacagataagggagaaacttttgtagaacaagtagatttcttcagttcgataatattcaaatccggtgtcggcagtggacaagcaggagaattttcatacgcagccgaaaggacaaagaaacgttcaataagaagattatatcaatcaagaaaatatagaatatggaccacacttgctttactgatagaaaacggatattgccctctatcaatagaagatttagataagtggagacgatacgacaaagaaaaaggattgaaaagacaatatccaattgaagcaatacaatttgaacaatggataagattagattttgacggagatggcaaacccgactacataaatccttacgaattgcgtgcagaaataatgcaaaaacaatttgatttcaacgaagaaattaatcgatacaaattaggtaggattctgtatcatataacccaaagaagaggcttcaaaagcagcaaaggagaaacgctcaaagaactttctgaaaatgagataaatgaagaccttgatttgtctgttgctctacaaaaatctgaggaaaagaagtctcaaaaactaaaagatttcatgaaagaacacaacattcctactgttggttgggctttctatgaacttacaaaacgaggaatcagaataaaagaaagcgaataccaagctgtaaggatacaatacaaagaagaaatacaaaagatatttgaatttcaagaaggattagatacaactagcgatttttacaaacatctcatgagcgaaaagaaaggcgaaggaacaattttctacaaaagacctctccgttcacaaaaaagtaaagtcggtacttgcacattagaaacaggcaaatcacgctgtccaatctcacacccggaatttgaagaatacagagcatggagctttataaacaacatcaagtatagaacaagtactactgcagaatggaaaactttgcctttgaacctcaaacaagaactattcaaagataaatttctcagaacaaagtcatacttcaaatttgaagaaattaaaaactggctctcttcaaaattgtgtcttcaattggaatacaccaacaagaaagaaacttcaaccatcaactacaaagataagacaaatgttgtcggctgtccgatttcagcacgattgaaaaacatattaggagaagactataaacaatggaaattcaatagtgataaagaacgcactaaccgaaagacaggagaagttcacagaataacctatgactatcttgacatttggcatatatgtttctcatttgacgaagcagaatttgtcgaagaatttgcaaaatgcaccttgaaacttgacgacaaacaagcaaagaaactttgcacacttcacaacaacatccagcaagaatacgcttcgttgagtctcaaagccattagaaatatcaatccgtttttacaaaaagggttgatttatactgatgccgtactcttggccaaattacctgaaatattcaaagacaagtggaatgaagtagaaaatgatattgtagcagctattgatgacatcatcaaagaaaacagatacgaaaagggaatattagatatcgtaaatgacctaatagccaactacaaatccttagattacggcgagcgatttgcagaacacaatacagaatacatactacaaagtcaagattacaccgatattgagagcaaattaaaagggcattttggcgagagaacatggaatgcaaaaccatgcgaagagcaagaacaaataaggaaagacgttcgtgagttgtatcaaatattctttggaagttcttcaagaggttatttcaaacagcccaaagtttcagaaagccttgccgaatatctgaaaaagcaatacacctacttaaatgatgatgacttgaaaaagatatatcacccatcaatgatagaattctaccctaaggtaaaaccaacactcttagatgataacaaatatgtaaaacttcttggcagtcccgttataggagcattgaaaaaccctatggcgatgaggattcttcacaccctacgcacccaaatcaatcaactaatcaaagaaggcaaaattgatgaatatacaaagattgttgtggaaactgctcgcgaagtaaataataccaacaagcgatgggcaatagaagaataccaacgaaaacaagaagaggaaaacaaagaagtagagaaaataatcagacagtactaccaaaaggacaacatttctgatgacgaaatcaaaaaagcaaaaatattacttgaccaatttgatgtagagaaagataacaaacaagaaaagaaacaagatacacaatcagacaagctaagcgatacttggagcaaagtaaaaagcaacaacataaaaagatacaaattgtggcttgaacaaaactgctgttgtatgtacaccggcaaagtaatacgcataagtgaattatttgacaatgataagttcgacattgaacatacaatacctcgaagcatctctttcgatgattctctttctaatctcacaatatgcgattctcatttcaaccgtagcataaagaagaaccaaataccaacacaacttgacaactacaatgagataaaatctcgtttggaactatggaaacagaaggtcaaatccctgaaagaaagagttgaatattggaaggaacaatcaaaaatatcacagacaaaagaccgaaaagaccaatgtatcaaacagagacttctatggcagatggaacttgattattgggaaaagaaacttgcttcatttacaatcaaagagttcattgacggtttcaggaacaaccaattaaatgacacacgtatcataacaaagtatgcatttcattatctgaaaacagtttttgaacatgtcagtgtacaacgtggggaaatcacttcgaatttccgtaaaattgtaggcatacaaaaagaagacgaaaagaaagatagaagcaatcactctcaccatgctattgatgccgcaatacttactctaatcccaagtgcaaaacaaagaaacaggatattggaaacattctaccaaatgaaagaatctaaggaaactaacaacaaagacaaattggaaaaaacaacaaaagaattagaaaaagcaaaacgtgctgccttgataccaaatgccgttgcggcaataaaagatcatatagagcaaaatatctttgttaatcacatttccaaagaccaaacacttactccggccaaacgaagaaaacgaatcagaggtaagattgacaaaaataaacaatggataataacaggagactgtatcagaggtagtttgcacaaagacagtttctatggttgtatcttaattgatggcaaaaaatatttcgttatcagaagagcattaaaatataaagcaaatgacaaagataaaggtttcaagacatggaatgaattagaaaatgccattgttgataaagcattgtatcgtcgattagtaaaaccattctgtcaagagggagcagaagaaccttctattgatttcaaaacagtcatgttagaaaaaggtggattatatgataatggcataaaagtaagacatattcgttgttatacttccgtgaaaaatcctttacaaataaagaaacaaacttacaaatcaaaacaaggctacaagaactactattatgcggaagttggcgatttatacacaatgtgcaagtatgagaacaaaaaaacaggggaaatagtctatcaaccatataacctatttgaggttgctgctaaccataaaatcacccatgagtttattccgtccaagtatgacgacaaagttcttacacaacaattagtcaaaggagatatgttacttatctacaaagataatcctaacgaattgtttgagatggacaatgtacaactatctaaacgtctatatgtaattgatggttttgagagaaaatcatgtttgacaaaactcattcgtagctcaaatgcccaacaagacaaagaattaggtaaaggagaaagcatcaaagacttcaataatcttccacaaaaaataaggcaaagcataaataagttgcactacttgcttcgtggtattgattttaagattataaatggaagaatagagttcttgaataaaacgaagtattatgattaa

SEQ ID NO: 109 - DNA, 4188 bp, Unknown
  OMNI nuclease sequence
atgagtaaaatcttgggaatcgatttaggaacaaactctattggattggcaatcagagacacagataaaggagaaacttttgtagaacaactggatttttttagttctatcatattcaaatcaggtgtcggtagtggaccatcgggagaattttcatacgcagccgaaagaacaaattcgcgttcaataagaagactatatcaatcaaggaaatataggatatggacaacgcttgcattgctaatcgaacatgaatattgccctctatcaatggaagatttagacaagtggcgacgatacaacaaagaaaaagggttgaaaaggcaatatccaattgatgctatcaaatttgagcaatgggtaagattggattttgatggggacggaaaacctgactatacaaatccttatgagctacgagcagaaataatgcaaaagcagtttgactttaactccgaaattgatagatataagttaggacgaatactgtatcacatagcccaaagaagaggcttcaaaagcagcaaaggcgaaacactaaaagaactttcagaaaaagagatgaatgaagaccttgatttgtctgatgcacttcaaaaatccgaagaaaagaagtctcaaaaactaaaagacttcatgaaaacacacaacattcccactgttggttgggctttctacgaacttacaaaacaaggaatcagaataaaagaaagcgaataccaagctgtaaggatacaatacaaagaagaaatacaaaagatatttgagtttcagaaaggattagacataaatagtgccttctacaaacatattatgagtgagaagaaaaatgaaggaacaatcttttacaagagacctcttcgttctcaaaaagggaaagtcggcacttgtacattagagcaaggcaagactcgttgcccaatctcacaccctgagtttgaagaatacagagcatggagtttcataaacaacatcaagtatagaacaagcacgactgcggaatggcaaactttgtctttgaaactcaaagaagaactattcaaagataaatttctcagaacaaaatcgtactttaagtttgaagaaatcaagaattggctttcagcaaaactaagtattcaattggaatgcaatgataagaaagaaaattcaaccatcaactacaaagacaaaaccaatgttattggctgtccaatttcagcacgattgaaaaacatactgggagaagactataaacaatggaaattcaaaagtgataaagaacgcacaaacctaaagaccggtgaagttcacagaattatctacaactatattgacatttggcatatatgtttctcttttgacgaggcagagttcgtcgaagaatttgcaaaagatagtttgaagtttgataacaaacaagcaaaacaactctgcacactccacaacaacatacagcaagactacgcttcgttaagtctcaaagccattagaaacatcaatccgtttttgcaaaaagggttgatttataccgatgctgtactcttagcaaagttacctgaaatattcaaagacaaatggtgtgaaatagaagatgatgttatcgcagatatagacaacatcatcaaagagaatagataccaaaaggaaatatccgacattgtaaatgacttaatcgccgactacaaatccttagactacaacgaacgctttgcagaacacaatacagaatacatattgcaaaaccaagattacactgatattgaaaacaagttaaagagtcattttggcgaaaaaacatggattacaaaaccatgcgaagagcaggagcaaataagaaaagacgtttgtgagctgtatcaaatattctttggaaattcaacaagagattatttcaaacaacccaaaatttcggaaagccttgccgaatatctaaaaaataaatacacttacttgaatgatgatgatttgaaaaagatatatcatccgtcaatgattgaaatttatccgatagcaaaaaaagaaattatcgatggggataaatctgtgagaagacttggcagtcctgttatcggagctttgaagaatcctatggcaatgagaatacttcatactttgcgatctcaaatcaacaaactaatagatgagagtaaaattgatgaacatacaagaatcatcgtggagactgcgagagaagtaaatgacgccaacaagcgatgggcaatagaggagtatcaaagaaaacaagaagaagaaaacaaagaaattgagaagattataagcaaatacttcgaagaaggcaatatctcagataatgacatcagaaaagcaaaagttttacttgatcaatttgacatagaaaaaaatgataaacaagcaaaagaaaaaaagacaaaatcagacgacaagctaagtgatacatggagtaaagttaaaagcgacaatatcaagaaatacaaattgtggcttgaacaaaactgctgctgtatgtacacaggtaaggtaataaccataagtgaattgtttgatggagataaattcgacattgagcatacaatacctcgaagcgtttctttcgatgattctctttccaatctcacaatatgcgaatctcatttcaatcgtagcataaagaagaatcaactaccaacacaacttgacaactacaatgaaatcgaagctcgtttagagacatggagaaagaaagttttgtcattaaaagatcgtgtaaacttttggaaagagcaatccaaacgagcacaaaccaaagatcgaaaagaccaatgcatcaggcagagacttctatggcagatggaacttgactattggaaaaagaaacttgcttcatttacaatcacagagtttatcgacagtttcaggaacaaccaattaaatgacacacgtatcataacaaagtatgcgtttcattatctgaaaacagtttttgaacatgtcagtgtacaacgtggagaaatcacttcgaatttccgtaaaattgtaggcatacaaaaagaagacgaaaagaaagatagaagcaatcactctcaccatgctattgatgccgcaatacttactctaatcccaagtgcaaaacaaagaaacaggatattggaaacattctaccaaatgaaagaatctaaggaaagtaacaacaaagacaaattggaaaaaacaacaaaagaattagaaaaagcaaaacgtgctgccttgataccagatgccattgcggcaataaaagatcatatagagcaaaatatctttgttaatcacatttccaaagaccaaacacttactccggccaaacgaagaaaacgaatcagaggtaagattgacaaaaataaacaatggataataacaggagactgtatcagaggtagtttgcacaaagacagtttctatggttgtatcttaattgatggcaaaaaatatttcgttatcagaagagcgttaaaatataaagcaaatgacaaagataaaggtttcaagacatggaatgaattagaaaatgccattgttgataaagcattgtatcgtcgattagtaaaaccattctatcaagagggagcagaagaaccttctattgatttcaaaacagtcatgttagaaaaaggtggattatatgataatggcataaaagtaagacatattcgttgttatacttccgtgaaaaatcctttacaaataaagaaacaaacttacaaatcaaaacaaggctacaagaactactattatgcggaagttggcgatttatacacaatgtgcaagtatgagaacaaaaaaacaggggaaatagcctatcaaccatataacctatttgagattgctgctaaccataaaatcacccatgagtttattccgtccaagtatgacgacaaagttcttacacaacaattaatcaaaggagatatgttacttatctacaaaaataatcctaacgaattgtttgagatggacaacatacaactatctaaacatctatatgtaattgatggttttgaaagaaactcatgtttgataaaactcatttgtaactcaaatgcccaacaagacaaagaattaggtaaaggagaaagcatcaaagactttaataatcttccacaaaagataagacaaaccataaataaattgcattacttgcttcgtggtgttgattttgagattataaatggaagaatagagttctcgaataaaacgaagtattatgattaa

SEQ ID NO: 110 - DNA, 4470 bp, Unknown
  OMNI nuclease sequence
atgaaaaatattcttggattagatttaggtacaaatagtatcggatgggctgtaatcagtcatgacggtatgtgttatagtggaataaagtgtgccggaagccgtatcatacctatggatgcagccacaatgggcgattttgacaagggtgttaccaagtccagcgcttcagaacggacacagcagcgcggaatcagaagattgaacgaacgttcattgttaagacgtgaacgtctgcatcgtgtgttggatataatgggtttcttgccagaacattattctcggaatttgactcgttatggcaaattcatcagtgaaaaagtgaaattggcttggactgacgaaggtcgtttcttgtttgatgcatcgtttaacgaaatgttgcacgaattccgctctcaacatccttcattgatggaaagcggtaagaaaataccatacgattggactgtctattacttgcgtaagaaagccctttcatatcctattaataaatttgaattagcttggatcttactcaatttcaatcaaaaacgtggttattaccaattgcgcggagaagaagatgatgaaaaagcttccaacaagtgggaagaatatatgtcattgaaggtgttacgagttgaagattcaggtgaaaaaaccggaaagtatacctggtatcgcgttcatctcgataatggtatgatatacaaccgcaaaagtaatattccccttgattgggaaggaaaaacaagagattttatcgttacgactgaattgaacaatgacggaacgcctaaaacagacaaagagggaaactttaagcgttccttccgttcgccgagcgaaaacgattggactctgatcaagaagaagacagaagccgacattgaaaagtcacagaaaacagttggaacatacatctatgaatcattgttacagaacccgactcagaaaatcaggggcaaattagtgcgtgttgtggaacgaaaattctatcgttcagaattaaaactaatattggaaaagcaatgtcgtttcctgcctgaattgcaagatgctgccctgttgcaagcatgtctggaagagctttatccgcacaacaggatgcatagggatattatttccaataaaggttttacgagtcttttcattgacgatatcatattttaccaacgtcctttgaaaagcaagaaatcccttattggcaattgtccttatgaatggcacagctatgtagacaaaacaaccggcaagacaaagactgtttataacaaatgcatagccaagtcgcatcctctttaccaggagttccgtttgtggcagttcttgtcaaatctgcgtatttacagtaaaggtacatacgagcaggatgtcaccacccgactgttgcccgatcaggaatcgtatgctgcccttttttcatggcttaatgatcgtaccagtatcaagcagaaagatttcttgaattattccggtttcaagctgacaaaaactgaacaaaagaactatcgttggaattatgtagaggacaaaacttatccctgcaacgaaacacgtggagaaattttaaaacgcatattagactgcaacttgcccgaaatattcttgaccaaggagcgtgaattgtcgctttggcatatcctgtattctgtagaagacaaagaacaatataaaaaggcattggaaaaatttgccgagaaaaattccattgattctgctgatttcgtagcagcttttgaaaaaatggcagcatttaaaaaggaatacggaagctattcggctaaagccgtttcaaagctgttgccgctaatgcgcagaggttcgtcttggtcggaaaccgaaatcgacaagaatactcttgaacgtatcaacaagcttattgatggtgaatatgatgaacaactttgcgaacaagcatatgaaggagttgcggggctatccgatgtctcccaatttcaggggcttcctgtttggctggcatgttatattgtttacaaccgtcattcagaagcaaccgacgtttcacgttgggagtctccggatgacatagacaagtacttgtctgattttcgtcagcactcgttaagaaatcccatcgtagaacaagtcgtattggagtgcttacgcactgtacgtgatatttggcgtcaggtcggtcatatcgatgaaatacacgttgagttgggacgcgaaatgaaaaatccggccgacaagcggaagaaaatgacagaaagcattttggaaaacgaaaaggcgaacttgcgagcaaaggccatgctgatggaactgatgaatcccgaaatgaaggtcgaaggagtgcgccctcattctcccggtcaacaagagctgtttcgtatttatgaagaaaacgtcctgaacagcgagaaagtacctgacgacatcacagaaattcttgcaaaattcaaccagacagataatgccaaacggcctacatcatccgaagtgaaccgttatcgcttgtggttggaccaaaaataccgttcaccatatacgggcgaaatgatttcgctaagcaaactgtttacctcggcttatgaaatagagcacattattccacaatcgcgttatttcgacgattcttttagtaataaggttatctgtgaatctgaagtaaacaaattaaaatcgaacttgttgggccacgagttcattaaaaagcatcaaggcgaaaaagtacagttgtctatggggaaaaccgttgaaatactttccgtagaagcttacgagaaattcgtaaacgagcattattcctataaccgggtcaaaaaggaaaaacttttgatggacgatattcccgaaaagtttattgaacggcagatgaacgattcccgttacatcagcaaattagttaaagccttgctgtcgaatatcgtccgtgaagaaggtgaaaaagatgccacttccaaaaatgtaatctcttgtacaggaggcattaccgaccggctgaaaaaagattggggaatcaacgatgtgtggaatggtatcatattgccacgtttcatcagaatgaatgaaatcgacaagaccaacagctatacggccattaatacttcaggcaatatcattcccgatatgccgtttgaataccaacgtggtttcagtaaaaagcgtatagaccatcgtcatcatgccatggatgccattgtcattgcatgcgcttcgcgtaacgttgtaaattacctgaataattcttctgccgcgaaagaatctgaagccgggcggatggatttacgcaacaaactgtgcaacaaaaactatacagacgataaaggcaactataaatggattatcaggaagccatgggaaacttttacgcaagacgtaaaggaaacgttgcaagacatcgttgtcagctttaagcaaaatctgcgcatcatcaataagagctcaaacagaaccctgcattttgaagagggcaagaaaaagctgcaaaagcaaacaaaaggagacaattgggccatacgcaaaccgatgcacaaagacactgtttatggagaagtaaacctgcaacgcaccaaggaagtctctttcaaggaggctttgaagcctgattatgctattgtgaacagggatttgaggaaaaaggttcttagcttgcaggcctcgggatatgatgtgaagcagatgatgaaatattttgaatcagaaaaagatgtctggcaggatgtcgattttaagaaaataaaagtccgctatttcaccaagacaaccaatgaccgctactttgctactcgcaagccgattgacagtagtttcaacaaaaagaagatagaagaaagcattaccgataccggcattcagaaaatcatgcttcgccatttggaaaacatgggtggaaaccccgaactggctttctcttccgatgggttggacgagatgaataagaacatcagggcattaaacaatggccggttccatcagcccgtttacaaggtcagaatctatgaaaaggccgacaagtatgccatcggtgaaaaggggcagaaagctaaaaagtttgtagaagcggccaaaggtacgaacttgtttttcgccatctatgaaaatgagactgttgataaatctacgggtgaaattcttcgtaagcgtagtttcacaactatcccgatgaacattgtaatgaatcgtttaaaacaagggctaagccctgtgcctgccaatgactgtggcaaggatgctaaatatgtgctttcgcccaacgacttggtctatgttcccactaaggcggagcttgaacacggcgttgatatggcctctcttgataaagaccgaatctacaaaatggtgtctgcagatcgtagcaacagccattttgtcaaagaatcggttgcaagcccgattgtcaataaggtcgaattcggaagtcataataaaatgcaatgcgctgttacaggagagatgataaaggaaatctgcatacctctgaaagtagaccgtttgggcaatatcatcaagatgggttaa

SEQ ID NO: 111 - DNA, 4470 bp, Unknown; identical to SEQ ID NO: 110
  OMNI nuclease sequence

SEQ ID NO: 112 - DNA, 4470 bp, Unknown; identical to SEQ ID NO: 110
  OMNI nuclease sequence

SEQ ID NO: 113 - DNA, 4470 bp, Unknown; identical to SEQ ID NO: 110
  OMNI nuclease sequence

SEQ ID NO: 114 - DNA, 4470 bp, Unknown; identical to SEQ ID NO: 110
  OMNI nuclease sequence

SEQ ID NO: 115 - DNA, 4491 bp, Unknown
  OMNI nuclease sequence
atgaaaaagatattaggcttagatttaggaacaaatagcataggttgggcagtagtaaatgccgacattgaaaacggagaaactaaaataaaaagcatagaatccgcaggaagtagaataatcccaatggatgcggaaattatgggtaaatttgaaacaggcaattctgtttcacaaacggcggagagaacaaagtgtagaggaacacggagattattagaacgtttcttgttaagaagagagcgcttaaatagagttttgaatttaatgggatttttaccagaacattattctgcaaaacttgacagatatggcaaatttattgatgaatcagagcctaagttaccttggtcaaaagatgaaaatggaaaaagtaaattcttatttcaagaatctttcttggaaatgtgtgatgaatttaaaagagtaaatacgggtattaaaaacattccatcagattggacaatatattatttgcgtaaaaaagccttaactaaacctatttcaaaatttgaattagcttggatactgcttaactttaatcagaaaagaggttattatcaatttagagaagaagaaatcgataataataaaaacaaaaaagaagaatactataaattacaagttttgagagtagaaaaagataacgaagaaaaaggctttacttggtataatatgcatttagaaaatggaatgatttacaaaagaaagagtaaaatgccattggataattgggaaggtaaaataaaagaatttattataacaactgaattaaatgatgatggttcagaaaagattgataaatatggagatgtaaaacgttcatttcgagtgccagaagaaaatgattggggattgatgaaagtaaaaacggaaaaagaaataaatgatagcaaaaaaactgtgggatgttttatttacgatgcgttgcttcaaaatccacaacaaaagataattggtggtttagttagagtagtagaacgtaaatactataaagaagaaatattgcaaattttaaaagtacaaaaagagtttattccagaactaaaagataaagacctattaatacaatgtatagaaagtttatatcaatcaaatgaaatacgtaggaatatattaaatcaaaaagattttacatatctttttgcagaagatatactattttatcaaaggccattaaaaactaagaaatatttaatctctaattgtccttatgaaacacgtaactacaaagataaagatgctgataaaattacagagccactaaaatgtgttgtaaaatcacatcctttgtttcaagaatttcgtttgtggcagtttatatctaacttaaaaatttataaaaaaggagttatagatcaagattgcacaaaccaatttctaaaaacagaagatgatatagtatcgttgtttgatttcttgaataataaaaaagagatagagcaagattctttactatctgctcattttaaaatcaaaaaaaaagacaaagaaaactatcgttggaactatgtagaggataaaaaatatccttgtaatactactcatgcttctttattgtcaagattaaaaaaaatcggtgtgtctgctaattttttaacaaaagaaatagaagaacatctttggcatatattgtattcaattaatgataaagaagaaatatataaagctttgttgaagtttgcaaaaaaatacggtatagaagattctataagttttgcagaagaattacaaaaagagatttttcaaaaagaatatgcttcttattcacttaaagctataaaaaaactcttaccactaatgcgatgtggcgattattggaaagaagataatattgatacaaaaacaaaagaaagaatagaaaagataataacaggggagtttgacgaagaaatagataataaggttagagaaaaattagagaattatacaaatgtttctcaatttaaaggactccctttatggcttgcttgttatgttgtttatggacgtcattccgaagcaaaggaaattactaaatggaatcaacctgaagatatagatgagtacttaaaacagtttaaacagcattcactaaataatcctattgttgaacaagttgttactgaaactttaagagtagtaagagatatttggaaacaagtaggaactattgatgaaatacacgttgaaatggggcgtgaacttaaaaaaactaataaggaaagagagactatatctaaacaaaacatagaaaatgaaaacaccaatcttagaataaaacaaatacttaaagagttcaaagaatcatatcctgatatagaagaagtaagaccgcattctccatcgcaacaaacaatatttagaatatatgagaattacgcattagctaatctttcaaaaacagataaagactataaagaaatcatagatatttctaaaaaagctaatcctacatctaatgaagtagctcgttataaactttggcttgaacaaaaatatcaatctccatatacaggagagatgattccactttcaaaactttttacttctgcatatcaaatagagcatataataccacaagcaagatattttgatgactcttttaataataaggttatttgtgaagcagaagttaatgggttaaaagatagaatgcttggctatgaatttataaaaaataatgggggagcaataatagaattgtcaggaggaaaaactgtaaaaatatttacagatgaacaatatgtggattttgtaaataaacactattttaatgtaaagaaaaagaatcttctattaactgatatacccgatgattttataaatagacaattaaatgattctcgatacataagtaaattagttaaaaatttactctcaaatattgttagagagaagttggaaaatggcgaatatgaagcagaagtaacttcaaaaaatcttattacttgtacaggtaaaataacagatagattaaaacaagattggggattaaatgatgtttggaatagaattatattgccacgattcgaaagattagaagaattaataggaaaagaagaatttactacttataatgaagaagggcataagattcctgcaatgccattggatttacaacaaggatttaaaaagaaaagaatagatcatcgtcatcacgcaatggatgcaatagttattgcttgtgctactcgtaatcacgtaaacttattaaataatgaatctgctttgtcggaaaataaagcaaatcgttatcagttacaatataaattaagaaaaagagaaaaagctaaaatcaatggcgaagaaaaggaagtgtttaaagcattctataaaccttgggatacatttacacaagatgctgaacaagtattaagaaatatagtagtaagtttcaaacaaaaccttagagtgctaacaaaagcaacaaataaaactcagtacattgacaaaaaaacaggaaaaatcaaattaaaaccacaagaaaaaggagaattgttggcaattcgcaaatcattgcataaagaaactgtttttggagaagtgaatttacgagaaataaaagatattaaactttctgaagcattaaacaaaccacaatcaatagtagataaagagttaaaggcagaggtttatagattaaaggcattaggtaaagatgataaagcaataatcaaacattttaaggataacaaagatatttggaactctgaaatcaaaaacgataaagttaaagtatattactttaccaaagagactaatgatagatattttgcaacaagaaaagcaataggtgatattgttagtaagaaagaagatataaagagcataactgattcaggcattagaaagattcttgaaaatcatttagaagctaatgatggaaatttagaaaaagctttctcaccagagggaatagaagaaatgaataagaatatttatgaacttaataataataaaccacatcaacctatttacaaagcaagaaaatttgaaaaagcggataaatttgcagtaggaaatagaggaaataagaataaaaagtttgtagaagcagcaaaagggactaatttattcttggctatttatgaattaaatgataaaagaagttatgttactattcctttaaatcttgtaatagattgtcaaaagaaatataaaaacaattggaaggagcaattggatagtgtattaaaagaagaaaaatatgtaaaggatagtaaaactaaattattgtttgttatttctccaaatgatttggtgtatttaccaatacaagaagaattaaaaacaaaacaatattcatttgatagaagtagaatttataagtttgttagtagtagtggtaaccaagctttctttgttccttattttatagctaatgctattataaaaacaactgaattaggtgcaaataataaagctgaacgtgcatggagtggagaaatgataaaagaaacttgtattcctatacaggtagatagattaggtaatattaaacctttatga

SEQ ID NO: 116 - DNA, 4341 bp, Unknown
  OMNI nuclease sequence
atgaaaaaaatattaggcctagatctcggcactaacagtataggttgggctgtagtgaatgaagcagagaaagaaggagaacaatcctcaattgttaaacttggagtaagagtgaatcctcttaccgttgacgaacagcaaaactttgaaaaaggaaaaagtatcacgacaaatgcaaatcgaacgttaaaacgtagtatgcgtcgtaatcttcaacgttataaacttcgtcgtgaaaatctgatttctattctgaaagagaatggattcatcagcgatgatacaattctttcagaaaatgggaatcgtacaacttttgaaacatatcgtcttcgtgccaaagctgcatcagaagaaatatcattgcaagattttgctcgtgtgcttttgatgataaataaaaaacgtggttacaaaagtagtcgcaaggcaaaatcgacggaagaggggcaattgattgatggaatggaagtcgccaaacgtctttatgatgaatgtttgactccaggacagctttcatacgaaataatcaaaggtggaaaaaaacatttgccagatttttatagctctgatttacaggatgaatttgataaaatatggaatgtgcaaaaaacattttatcatgaattgctaactgataatctaagagaaaatctaaaaggaaagaataaaactcagacatgggctatttgtgcaaaaccatttggtatagagggaatcaagcgtacaaccaagggcgttgaacagaaattagaaaactataaatggcgtgttactgccctcaatgaaaaattggatttggaagagttggcagttgtattacaagagattaatggacaaataagtaattctagtggctatttaggtggtataagcgaccgtagtaaggaactctattttaacaaacagactgttggtcagtacttgatggaaaatttggatgcagactccaattatagtttgaaaaatcaggtgttctatcgccaagattatcttaatgaatttgaaaaaatctgggaaacgcaggcccaataccacaaagaactacttacacctaaactaaaaaaagagattcgtgatgttgttattttttaccaacgttcgttgaaatcacaaaaagggttgatttctgtatgtgaattagaaggaaaacaagtcgagtctgaaaagaatggaaagaaatatataaagacaattggaccgaaagtgtgtccgaaatcatctccattgtttcaagaatttaagatttggcagatgctgaacaatgtacaaatctcttgtaagtctgtccctgataagcaaaaaaacatttggaatgataaccaaggaaaacgatttttatctcaagaggagaaagaaaaattgtttgttgagctgagttataaagaaagtttatcgaaagcggatgctttaaaactgttgtttaataatagtaaagattatgatttgaattacaaaatactggaaggaaatcgcactcaatccgaccttttcaaagcatatcaaactattatcgaaatgagtggttacgacgagtatgatctttcaataatgaactcagaaaaggctgttcacaaattgaaagaaattttcgatggtttgggttacaatagcgatattcttatgtttgactcttctttggaaggtcacaaattagaacaacaatcaatgttccgattatggcatttgatttattcttttgaaggtgataattctgttatcggtaacgaaaaattaattgaaaagatacaagatacatttggatttgagagagaatatgccactgtaattgctaacgttgtatttaaggatgcaggagaatatagtagccttagtgctaaagctatccgcaaaatattacctcatcttaaagatggcaatgattatagtgtggcatgtgagtacgcaggctataatcattctaagagctcgcttacaaaagaagagatcgagaataaggtattgaaagacaagttggatttattgccacgaaacagtttacgcaatcctgtggttgaaaagattctcaatcagatgattaatgtagttaattcaattgtagatacgtatggtaagccagatgaaatacgtatagaattggcaagagagttaaaaaagtcggctaaggaacgagaagaattaacaaaatcaataaatagtacgactaaactacacgaagaatatgtcactatattaaaaaatgaatttggattatctcgtgttagtcgaaacgatatcatacgatacaagttgtataaggaacttgaatgtaatggatacaaaactctttatactaatacttatatacctaaggaaaaactttttagtaaagagtttgatattgaacatattatccctcaagcaaaactgtttgacgactcattttcaaataaaacgcttgaatctcgtcaggctaatttggacaagtctaacacaacagcttatgattttgtggcggctaaatatggagatgattatgccaacggagagtataaatcgcgtatcgaaaaattgtataaagatggtataatcaccaaaacaaaacgcgataaacttttgatgaaagaggcagatattccaagtggatttatcaatcgtgatttacgagattcgcaatatattgctaagaaagcacgagagattttggaagatttggttcattttgttgttccaacaactggtagtgtcacagatcgtctacgtgaagattggcagcttgtaaatgtgatgcaggaactcaattggaataaattcaatcaattgggcatgacctattatgagcaggatcgtgatggacgacaaatacctaaaataaaggattggacaaagcgtaatgaccatcgtcatcacgctatggacgctcttactattgctttcaccaaacgtagttttatccaatatctaaacaatttgaatgctcgtgtagagaaaggcgttgaggactggattgatttagatatggttgacgtttccaaattggataaagaaaaacgaacttcggtggtgtactctattgaaaaaaaagaactttatcgtgacaaaaaaggtaaattgcgtttctgcccacctatgccattgcacgaattccgtgcagaagtaaaacgccagttggaaagcatccttgtttctaataaagcgaaaaataaggttgtgacaaataatgtgaataaagcaaaaaataatgtcgaatcgtttattcaaaccaaagacggggaggtaaggaagataaaaggtcaggtagtaaaaacgccacgtggacagttgcataacgaaactgtttatggttgttcaaagcgatacgaggcaaaagaagaaaaagttaatgcttcttttgatgcagagaaaataaaaacagtagcatgtaagcgttatcgagaagcactgatggaacaattaaacaaatttggaggagatgctaagaaagcgtttactggtaaaaatgctatagataaagctccaatttggctggatgctctgcatacagaaaaagttccagagaaagtaaaaacggttggctttgtctatatatacacaatcagaaaggaagttggtccagatttgaaagttgataaagttgtagacacacgcattaagaaaatattagaatctcgtcttaatgagtttggtggtgatgctaagaaagccttttcaaatcttgatgaaaatccaatttggctcaacaaggaaaaaggtatttccatcaagcgtgtgacaattacaggcgttagcaatgcagaggctttacacgacaagagagataaagacggaaatttaatttttggagatgatggacaaaagcaacctgtagattttgtaagtacaagcaataatcatcatgttgccatttatcgtaaaccaaaattggacaaaaataatcagcctatgcttgatgaaaaaggcaacatcctatatgaacttgacgagaaaattgtttcattctatgaagcaacatcacgtgcggtgcaacatttgcctattatcgacaagacatataaaaaggatgaagactggcaatttctatttactatgaagcagaatgaatattttgtgttccctcgctatgacgaaaatggaaatatgatttttaatccattggattatgatgagtcatggtatagaaatccggacaattatgcagagattagccctaatttgttcagagtacagaaaatagcaacaaagaattatttttttaggcatcatttggaaacgacggtcgaaacaccaaaggcgttagctggtattacatacaagccacaattaggcttgaatggaattgttggtatcgtaaaagtacgtgtaaatcatattggacaaattgttgctgttggagaatactga

SEQ ID NO: 117 - DNA, 4116 bp, Unknown
  OMNI nuclease sequence
atgaaaaaagtattgggacttgaccttgggacggccagtatcggttgggcatttgtcaatcaggcagaatcaagcggtgagcattcttcaataatcgcaaccggtgtcagggtgaatcccttgacgactgacgaaaaagacagttttgagaaaggtaaagcaataacaaccaatgctgaccgccgtcaaaagcgaggcatgcggagaaacctgcagcgctacaaattgcgccgtgagcacctcttgtccgttctcagacgcgaggggtggataaacgaagacactgtcctgtccgagcagggagcacgttcgacttatcagaccttcagattcagggcggccgctccggcagaggaaatttcccttgaagatttgtcccgtgtcctgctgatgatcaaccgcaaacgcggatataagagcaaccgtaaaactgacaagggtgaggaggggcatctgattgacggaatggaagttgctcgtacactttatgatgaggggcttactcctggagagtattctctgcgccttgtagatgaaggaaagcgtgtcctgcctgactattatcgctcggatttggtggcggaactggagaaaatctggttatcccagaaagtctggtatccagatatccttacggatgagttcaaaaacagcatcgagaatgacggacgcaacggggtcatcaagaaattccttagccgatactctatttatactgctgataataagggtaaagacaagaaaaagactgccctcgaatggagggttaaagccctcacggatcagcttgataaagagactcttgcctatgtaatagcagacttgaaaggtgctatacaaggttcaagcggatacttgggtgcaatcagtgaccgtagcaaggaacttgtttttgacaattttacagtaggtcagtatctatggcggcaaattgaacaggatccgaattatagcacgcgaaacaaagtcttctaccggcaagactatatggatgagttcgagcgtatctgggaatgccagaaacgttttcatccggaactgaacgatgagctgaagtcggagatccgggatgtggtgatattctatcagcggcggctcaagtcccagaaaaaccttataagtttctgcgaatttgaaactcgtgacatcaccgtggaggaggccggtgtgcaaaaagtcaggaaatgcggttgtcgtgtggccccacgctcatcgttgcttttccaggaattcaagatatggtcagtcctcaacaatatctccgtcaagagcaggacggatggcagtaccgttgaggtcactgatgagatgaagaggcgactttttgattatctttctgtaaatgataagattacagtatccgacatgctgcgcctctttgaactcaagccgaaagggtacgatgtcaattacagggatattcagggaaatttgactttggctgagttgtaccgtaagttttttgaggtcgtttcagccagcggtaacggagaacacgaccttgccaagctgtcatattcgggtgcgtataagattctttttgaggtgtatagtgcgttggggttcagtactgaaatcctctctttcgattcttcattgcctaaagaagaatatgagcgccagccgctattcaagttgtggcatctgctctactcctatgagggggataactctaagaccggggacgagagccttattcgcagggtggcggaaatctgcatgatgcccgaagaatatgctcggatcatcgcatctgtcaagtttcttgatgactatgcttcactcagccacaaggccatgcggaagattcttccgcatttgaaggacggctacgcttatgatgaggcatgtgctcgggccgggtacaaccattcttcttccatgacaaaagaagagaatgaggctcgggttctgaaagacaggcttgaggtgcttccgaaaggagcgttgcgcaacccggtggtggagaaaatcctcaaccagatggtcaatgtcgtaaacaccttggcggatgaatacgggaagccggatgagatccatatagagatggccagagaactcaagcagaatactaaacagcgggagaaggccaccaaagacatatccgaaaatacgaagcgtgatgaggagatagtgaaaaaacttcaggaggagtttggacttaagtatgtcagcaaaaaggatatcctgcggtacaggctctatgaggagcttaagccgctcgggtacaagacgctgtattcgggccagtatattcctaaagatcgtctcttctccaacagcattgacatcgaacacatcatcccgcaggccctgatgtttgacgattcctattccaacaagactctcgaattcagcgatgtcaaccgtgacaaggggaaggagacggctttcgattatgtgtcaaggaaatacggcccggcagagttggacgcatataagcttcgtgtccatgagctttattctcatgaggtgatttcggcccgcaaacgtgaccgcctgctcatgaagcagagcgatattccatcggacttcgtcaatcgcgatctgaccaattcacagtatattgcacgtaaatccacggaaatgcttggcgagtttgtccgtgatgtgatgccgactacaggtagtatcacagcacttctcagggagcagtggcagcttgtggatgtgatgaaagagctaaatcttccaaaataccgtcaggccggcaaaactttcacagtcaccaagtctgacgggcaaagtcttgagaagatcagtgatgactggacgaagaggaatgaccatcgtcatcatgcgatggatgctttgacaatcgctttcacaaggcgttctcatatcaaggtcctgaatacgcttaacgcgcttccgggttccgaagattacagcctgaaggagatggttacgaccgtgttgcctaatcgtaagcgtatattcacacctcccatgccgcttggagaactccgttccgcattcaaggaggcacttgagtcaacgctcgtttccatcaaggccaagaacaaagttgccaccaggaatgtcaacaagtcaaagataaaggacgggactatcgccgttgagacattgacccctcgtgggcagttgcacaaagagcaggtctacggacgtcgacgggtatatgagacatttgaggtgacggtcggaggcaagatggatgctgccatgattgcttctgtggcttcaagggccgaacgtgaggccttgaagcggcggcttgaggcgtttgggggtgaccccaagaaagccttcaccggcaagaactctctggagaagaatcctctgtatgtggacgaactccagtcagttgctgttccggccaaagtgaagtgcgtgaggatgaaggaggtatatagcatcaggaaggagatcgggccggatatcagtgtggataaggtcgttgacgggcgcgtccgtgctcttctcaaagccaggcttgacgaatatgatggagatccgaagaaggcctttgtgaatcttgaggagaaaccgatatgggtggatgagtccaaggggatcaaaatgaaaaaagtgacagtcgctgagaattttgacctttgtgctatccgggacaagagggacaaggatggaaaactgattttggattctgccggcaacacgattccgtctgattatgtcaatcctcgcaataaccatcacattgcaatctatgaagatgcggatggcaattatcaggagcaggtcgtgactcttcttgaggcacttcaacgcaagactgccggaatgcctgttattgacaaggcgtaccatgaggatctcggctggaagtttgttttcagcatgaaactcaacgagatgtttgttttcccggatcctgcgaccggtttcgacccttcagagatggatctgatggatccggccaattatgcgtcgataagtcctaatctgttcagggtacagaagttgagcagcaagtattatgtctttagacatcaccttgaaaccgcattggaagatactccggaactgagggacatcacttggaggcgaatacagaattacaatgcgttgaaaggtatcgtcaaagtccgcatcaaccacataggtcggatagtcgcggtgggagagtattga

SEQ ID NO: 118 - DNA, 4116 bp, Unknown
  OMNI nuclease sequence
atgaaaaaagtattgggacttgaccttgggacgaccagtatcggttgggcattggtcaatcaggcagaatcaagcggtgagcattcttcaataatcgcaacaggtgtcagggtcaaccccttgacaactgacgagaaagacagctttgagaaaggtaaagcaataacaaccaatgccgaccgccgtcaaaagcgcggcatgcggagaaacctgcagcgttacaagctccgccgggaacacctgttgtctgttctcaggcgtgaaggatggataagtgaggatactgtgctgtccgagcagggagcgcgttcgacttatcagaccttcagacttagggcagctgctcctgcagaggaaatctcccttgaagatttgtcacgtgtcctgctgatgatcaaccgcaaacgcggatataagagcaaccgtaaaactgacaagggagaggaggggcatctgattgacgggatggaagttgcccgtacactttatgatgaaggacttactcctggagagtattctctgcgtcttgtaaatgaaggaaagcgtgtactgcctgactattatcgctcggatttggtggcggaactggagaaaatctggtcatcccagaaagtctggtatccggatatccttacggatgagttcaaaaacagcatcgagaatgacggacgcaacggggtcatcaagaaattccttagccgatactctatttatactgctgacaataagggtaaagacaagaaaaagactgcactcgaatggagggttaaagccctcgcggatcagcttgataaagagactcttgcctatgtaatagcagacttgaaaggtgctatacagggttcaagcggatatttgggtgcaatcagtgatcgtagcaaggaacttgtttttgacaatcttacagtcggccagtatctctggcggcaaattgaacaggatcccaattatagcacgcgaaacaaagtcttttaccggcaggactatatggatgaattcgagcgtatctgggtatgccaaaaacgttttcatccggaactgaacgatgaactgaagtcggaaatccgcgatgttgtgatcttttatcagcggcggctcaaatcccagaaaaaccttataagtttctgcgaatttgaaactcgtgacatcaccgtggaggaggccggtgtgcaaaaagtcaagaaatgcggatgccgtgtggccccacgctcatcgttgattttccaggaattcaagatatggtcagtcctcaacaatatctccgtcaagagcaagacggatggcagtaccgttgaggtcactgatgagatgaagaggcgactttttgattatctttctgtaaatgacaagattacagtgtccgacatgctgcgcctctttgaactcaagccgaaagggtatgatgtcaattataaggagattcagggaaatttgactttggctgaattgtaccgtaagttttttgaggtcgtttcagccagcgggaacggtgaacacgatcttgcgaagctgtcgtattccggggcgtataagattctgtttgaggtgtatagtgcgttggggttcagtactgaaatccttacgtttgacgcttccttgccaaagaaagagtatgaatgtcagcctcttttcaaactctggcatcttctctattcttatgagggggataactccaagaccggggacgcgagccttattcgcagagtggcggaaatctgccggatgccggaggaatatgcccggattatagcatctgtaaagttacttgatgactatgcttcactcagccacaaggccatgaagaagatcctgccgcacctgaaggatggctgtgcttatgacgaggcatgtgctcgggccgggtacaaccattcttcttccatgacaaaagaagagaatgaggctcgggttcttaaagacaggcttgaggtgcttccgaaaggagcgttgcgcaacccggtggtggagaaaatcctcaaccagatggtcaatgtcgtaaacaccttggcggatgaatacgggaagccggatgagatccatattgagatggcccgtgaacttaagcagaatgcaaagcagagggagaaggcaactaaagatattgctgacaatacgaagcgtgacgaggagatagtgaaaaaacttcaggaggagtttggacttaagtatgtcagcaaaaaggatatcctgcggtacaggctctatgaggagcttaagtcgctcggatataagacgctgtattcgggccagtatattcctaaagatcgtcttttctccaacagcattgacatcgaacacatcatcccgcaggccctgatgtttgacgattcctattccaacaagactctcgaattcagcgatgtcaaccgtgacaaggggaaggagacggctttcgattatgtgtcaaggaaatacggcccagcagagttggacgcatataagcttcgtgtccatgagctttattctcatgaggtgatttcggcccgcaaacgtgaccgtctgcttatgaggcagagtgatattccatcggacttcgtcaatcgcgatctgactaattcacagtacatagcacgtaaatccacggaaatgcttggcgagtttgtccgtgatgtgatgccgactacaggtagtatcacagcacttctcagggagcagtggcagcttgtggatgtgatgaaagagctaaatcttccaaaataccgtcaggccggcaaaactttcacagtcaccaagtctgacgggcaaagtcttgagaagatcagtgatgactggacgaagaggaatgaccatcgtcatcatgcgatggatgctttgacaatcgctttcacaaggcgttctcatatcaaggtcctgaatacgcttaacgcgcttccgggttccgaagattacagcctgaaggagatggttacgaccgtgttgcctaatcgtaagcgtatattcacacctcctatgccgctcggggaactccgttccgcgttcaagtcggcacttgagtcaacactcgtttccatcaaggctaaaaacaaagtcgcgaccaggaatgtcaacaaatcaaaggtcaagaacggaacaatcgctgttgagacattgacccctcgtggacagctgcataaagagcaggtatacggccgccgaaaagtatatgagccattcgaggtgacggtcggaggcaagatggatgctgccatgattgcttctgtggcttcaagggccgaacgtgaggccttgaagcggcggcttgaggcgtttgggggtgaccccaagaaagccttcaccggcaagaactctctggagaagaatcctctgtatgtggacgaactccagtcagttgctgttccggccaaagtgaagtgcgtgagaatgaaggaggtatatagcatcaggaaggagatcgggccggatatcagtgtggataaggtcgttgacgggcgcgtccgtgctcttctcaaagccaggcttgacgagtatggtggagatccgaagaaggcctttgttaatcttgaggagaaaccgatatggatggatgagtccaaggggatcaaaatgaagaaagtgaccatagccgagaactttgacctttgcgctatccgggacaagagggacaaggatggaaaactgattttggattctgccggcaacacgattccgtcggattatgtcaatcctcgaaataaccatcacattgcaatctatgaagatgcggatggcaattatcaggagctggtcgtgactcttcttgaggcacttcaacgcaagactgccgggctgcctgttattgataagacgtaccatgaggatctcggctggaagtttgttttcagcatgaaactcaacgagatgtttgtcttcccgaatccggcaaccggcttcgacccttcagagatggatctgatggatccggcaaattatgcggcgataagtcctaatctattcagggtgcagacattgagtagtggtgattatcgtttcaggcatcatctggagacatctatagagagtgataaagaacttaaggatgtgacttggaaaagattaaaaagtctgtcctcactaaaaggtatcgtcaaagtccgcatcaaccacatagggcagatagtcgcagtgggggagtattga

SEQ ID NO: 119 - DNA, 3666 bp, Unknown
  OMNI nuclease sequence
atggaaaaaattttaggactcgacctcggcgtatcgtccattggctgggcggtaatcacacaagactctgaaaacgaagaaaataacactattctggattgcggtgtccggattgttccgctgaactcagatgaaatcagcgaatttcagaaaggcggcaatgtgcctaccaatgtgaagaggcgacagtcccgcggcatgcggcgcaacctgcagcgctaccgctggcggcgccaccggctgtaccaagtgctcaggcggctgggtatgatgcccgaccgcgacttgatgaatcgtttctgcccacaaggcctctacgccctccgcgagcgcgccctaagagagccgctcagcttgcaggaaatcggtcggattttcatccacctcaacaattggcgtggctatcgcagcaaccgcaaagagcaagtggacaaagacggcaagaagcccagcgagtacctgaagcaaattgctgaaaatgagtccatgctgaacggccagaccatcggccagtacttcgccgcccgccttcgggaggatgagacctaccgcgtcaggcaacagatattcaaccgcgaaacgtacatgcgcgaatttgacctgatctgggccacacaagcccagtatcatccgcaagtgctgacggaagccaaccggcacttgatacgcgacaagatcatctatcggcagcgccccctgaaatcggccaaaaaaacggtaggcgaatgcgccctcgagtggtactacgccttggacaaggagacgcacaagcccatcgtgctgcccaacggacagtacaggatagtgcgccccaaatgcgcccccaatacctctccattggcgcaagtgtgcaaggtttgggaaagcattcacaacctgcgcatcaacgacgcattgggtcaacctcgaaaactgagcttggaggagaaaaagaaaatcttctatacccttcagaacatggataaaaacctcaaggagagggatttgctgaccaaggtgctgaagttgtctcccaaactctacactgttgaccgcttagtgaaggaaaaagggctggaatacaaccgcactaaggccgtgctggcaagcgccttcaagaagatgggcatacaacgcgacgacctgctccagtttgaaccggagatagaagaggtggattgggttaaccccgaaaccggcgaagtaggccggcgccttcaggtgcgcggcgacttcgaccagcagcccctgtatcggctctggcacctgatctacgccaccgaagacgagcacacgctcatccgcctgttgcaggagcgctacggctttaccgaagcacaggcggccgaattagccaaaattgattttaactccgccggatatgcgcgcaaaagtcaccgcgccatgcggcgcctcctgcctcactacgaagaagggctcgactacgccgccgcctgccaggcagcagggtaccgccacgctcaatacctgaccacagccgaaaacgaagcccgccaactgttggacaaattagaggtgatacctaaaaactccttgcgcaaccccgtagtcgagaagatcctcaatcagatgatccacctcgtcaatgacctcatcgaaacctacggcagacccgatgccatccgtgtcgaactggcccgagagctcaagcaaagcgcccaggaaagagaagccaccagcaaacagatgcggagccgcgaaagggaaaacgccaagatccgggaggaaatagccgaactgctcaacatgcccgcggagagcatcactcgagccatggtggaaaagtacaggctttatcaggaaaccgacggcatctccttgtactccggcaaaaagataccgcttgccgtattcctccgaggcgagggcgtggacgtggagcacatcatacccaaagtctcccgtttcgacgattccttcagcaacaagaccttctgcgaaacagcgctgaaccaactcaagtccaacttgacggcttacgatttcatgaaggcccagcctgtgccggggctgcagtccttcgaagcctacacaaggatggtcaaggacctgtacgacagcaagaaaatcagcagaaccaagtacaacaacctgatgatgacgggcgagcaactgctggaggatacaggcttcctgcaacggcaactgcgcgaaacccagtacatcgccagaaaggcattggaaatcctccggcaagtgtgccgcaaggtcaactccaccacgggcagcgttaccgatttcctccgtcatcaatggggatgggacaatgtcatccacgacctccgactgccacaattcaaacaggctgaactgaccgaaatctctttcaagaataatggcacccaacccatagaggtcatcaaggggtggaacaaacgcatggaccaccgccaccacgccctcgatgccttggtagcggcctgcaccagccaaagccacatccagcgcatcaacaacctcaaccagatactcgcgggaaaagaaggctcagagcgccgcgaagagctcctccgcatcggacgcgccaaattcatcgcaggcaagcggcccttctcctacgcacaggttgcagaggccattagcaacatcctcgtctctcacaaacaaagccaccgcgtcgctacccgatcccgtaaccgcccaaaaggcagcgataaagtgcaaattaccctcaccccgcgcggctcactccacgaagagacagtgtacggtcggattaaacaatataaaaaggtgctcttaaacacgagtttctccttggacaacctggctcaaatggcacacccccaccaacgcgaactcgtagaggcgcgactggcacagtacgacaatgatccgaagaaggctttcgaaaacctggaccagaaccccatcctttacggccccgatggcatcaaacgcctcacccacgttaccctctgggaatacaccttggtggcgcgaaagagcattgcacctgacctgtcggaaaaatccgtagagaaaatcgcagacaacaaagtccgtcaattggtgcaagcgcgtttggaaagcggcggaggaaagtccaaggaagccttcaaaaacgtaggcaacgaacccataatcctcggaaaataccccgtaaagcgggtacgggtaaaaaaccccgctgaaaaagtcatcgccctgccgcgcggcttcgtagagcctggcagcaaccaccacatcgccatctaccgcgacgccagcggagaactctgcgaacacgtggtaaccttctgggaggccttccaacgcgtgcgcctcggcctgcccgccatcatcaccgacatagccgcagcactcgaccacatcagccaactgcccggtgaactgccgccgctccaactgcccgaaaacccagagtggcagctcgtagtgtcgctcgcccggaatgatatgtttgttttcggtttagacccatcggaaatagacctcaccaaccccaaaaaccgaaaaacggtgagcaagcacctgttcaaggtcaggaaaataaccaaaggaggctactggtttttgcaccacttggagactacacccttggaagatgtgatttcaaagaaggtgggtcgctgtaaacaatgctcttcctcctctctaaccggtgcggtaaaggtcaaagtcaatcgcctcggccacattgttgggatagggccttccatttga

SEQ ID NO: 120 - DNA, 4509 bp, Unknown
  OMNI nuclease sequence
atgagaaagaaaattattggccttgatcttggtacaaatagtattggctgggcctatatagaacgaaactccgaactaggtgatggaaatatagttgatgcaggtagtagaatcattcctatgcctcaagatgctatcagcaaatatgaaaccggaaatttgcaatcttctgcttctgtccgtacaggatatcgaagtatgcgaaggttatatgaacggtcagaattacgtcgttcgcgtttgttgagggtcttgaacattctaggcttcctaccacaacattatcgtgatgcaatagacttcaaggttcatttgggacaattcaaaaatcatggtgagccattacttccgtataagaaggacactaatggaaaaaatacttttatcttcacagaatcctttcatgagatgcttgaagatatgagaacatatcatccggaacttttgtccaacggtagaaaaataccttatgattggacgatctattatttacgcaaaaaagcactttctcaacccattagtaaagaagaactggcttgggttattcttaactttaataccaaacgtggctattatcaattgcgcggaaaggaagaagaaatagcaactaatgagcatcaattctatgatgttttagaaatagatagtgttgaggaaactggattaaaccttaagaagaaaggttataaatggtttaaagtccattttaccaacggcaaagttcaaaatcgtacttggaaagaagcaccctgtcgagtgggagataaggtggaatgtatcataacctacttggtgaaaaaagatggcactccaaagatggatgaaaacggagaacagctatataagattacggctccagatccaactgattggacactaagaaagaagcgcacagagtcaattataacgaaaggtcatgtcactgttggagaatatatttacgaccatctgttagtggagccagacgacaagattcgtggaaagtatgttcacaccatagagcgtaaattttataaagaagagttacgtactattctagaaaagcaaaaggaatttataccagaattacgtgacaagaaacttctattagcttgtatttctgaactttatcataacaattatgctcattgcagtgtcttagaaaaacaggattttacaagactctttgtggatgatattatcttctaccaacgtccactgaagagcaagaagagtctcattgcagattgccctttggagtactatcctttcaaggataaggatggcatatggaagcataggcccattaagtgcacgcctcgctctaatcctctttttcaaaccttccgactttggcaatttatccaaaatctaagaatctatcgtcgtgaagaggagcacgaaggtcgactgttgctggatgtagatgtgaccgggcaattcctttctacgccagaagactattgtgatctttttgattggttacgggcaaaaagcgatatcacgcaaaagcaacttttggcttatccacctttctgccttgggaaaaaagctaaagactataggtggaattatgttgatgacgataaacatgcctatccgttgtgcagcacacatcatgatatcagcaaggctattaaagaggtagacgacactctttctctttcagctaaagaggaaaaaagcctttggcatattctctactctgttgacgaccgctatgacttagagaaagctctccgtcattttgctagcaagaacggtattgatgaggagaattttgttaatgcattcataaacttcaagccttttgataaaagctacgctagctactctgaaaaagcaatcaagaagatgctgcctctaatgagtacaggccgatattggaatgcggaaggcatagatgctcatacgatgcaaagaataagccacatagtgaatggtgaggttgataaaagtataagcaacagtgtgcgtgagaaatgcgcggggttagaccgaatcgaaaaatatcaatttctacctgtatggaaagtatgctatattatatacaatcgccattccgaagccacggatacgattcgatggacaacccccgacgatattgatacctatcttaaaaaggaattgcgtcaaggaactcttcgaaatcctgtggtagaaagcgtcttgtcagaggccctacgtgtggtacgcgatgcatggaggcaatatgggcgtcctgatgagatacatatagagatgggacgtgatctgaagcaaaacaaagcccaacgccagaaagccaatacaattatgcttaataaccagcaaacgaatctacgtatccgttgtatgttgcaggagtttgccgatcctgattttcatatagcaaatgtcagaccacaatcacccagccaacaagaacttctcaaaatatatgagcaaggtgttttcgacagcattggcgaaattcccgatgatattcagactattattgaccatatagggaataagaatcatggcataagtaaaagcgatatgttaaggtataaactatggctagagcaaaagtaccaatctccttatactggatgtcccatatctttgtcacgtctttttacatctgagtacgagatagaacatgtcattcctcagtcacgatatttcgatgactcactgagtaataaggttatctgcgagacagaggtaaaccgtgtgaaaggcactatgcttgctcatgagttcataaaatcaaaaggagggtcaatagtcaaaggcacaggagggaagcaatataaaatacttgacgctgcacagtacgaggactttgttaaaagtcattatgtcacaaacaagtcaaaaatgcgtcatttgatgttagatgacattcctgacagctttatcaacaaacagataaacgacacacgctatatggctcgaaaggctcttgacatcttttcgcatttggtacgagaagagaccaacgatgatgctgctatttcaaagaatgtcattgcatgtagtggcgctattaccgacaggctaaagaaagactggggcttgaatgatgtctggaatgatattgtgtcatcacgcttccaacgcatgaacgatattacccattcttccgattacggacagtgggtaaataaagggggtaaacgctattttcaaatcaatattccactagaaatctccaagggtttcagtaagaagcgcattgaccatcgtcatcatgctatggatgccatcattattgcatgtaccacacacagtatagtaaactatcttaataatgcttcagcagcagaacttggcgcacgccatgatcttagaagtgccgtgtgctttaaagacaataatgttgatggaagtggcagttatagatggactgttaagaaaccttggcaatcattcacacaagatactcacagttgtctagagcatatcgttgtaagtttcaagcaaaacaagcgcctgatcactaaggtctctaaccgctattggcattatcgtgatggcaagaaaatcttggatcgtcaagtaaagggcgatcttttggctattagaaaatctttacataaagctacagtgtctggtgctttgtatatgcctgagatgaaaagagttagcttgaaggtggctttgcaagatattaactctatttgtgacgcaaaggctagaaaagaaatccaccatataatcaatgatctctataatggtcatgcggataatgcaacactcttaaaatatttcaaagcaagaaaatttctagtaaatggtattgatttcagtaaactgaatgtaagagtcctaccaacacagcctaattactctgcatcgagagtagctcttgatagtacttttactgagaaggacatcgaaaaggtaacagatacaggtatacaagcaattctcaggcgccatctcgcccattatgtcaatgaaaggggagaatatgacagtacagccgctttctctgcagaaggcatcgctgtcatgaacgaacatatctctgagcttaataatggcaagcctcataagccgattcttaaggtgagaaagaaggaaaccataggacagaagttcaacgtgggtactgttggctctaagaataagaagtttgtggaagctgataaaggaaccaatcttttctatgcagtctatgccaatgctgacggaatacggtcttacgaaagcatccctatgaatatagcaatagagcgcctgaagcacaagatggatgtttccccatcaacgaatgacaatggtgataagttgctatttgtactttctcccggtgatcttgtttatctgccacaagaaggcgaacacgttgcactgcctttggataatagccgtatttacaaaatggtttcatgttccaagactcaatgctgttttgttccctattacgtagcaaatgttatctgtgacaaggtcgagtatggccctcacaacaaggtggaacgctctttggatggcatcatggtaaaaaccagatgtgtaaagctgaaagttgatcgcctcggacacattagtgtttga

SEQ ID NO: 121 - DNA, 4440 bp, Unknown
  OMNI nuclease sequence
atgaatgccaagcactacattctcggcctagacatgggtacaaacagcatcggatgggccgctattgacgctgaaactcagcaaatcatagcaacgggtagccgtattatcccgatggacgaacgaagtatcaccgatttcgacaaaggtgtattacaatcgtctgccgctcagcgcaccctttaccatcgaatgcgcatcaccaacgaacgagctaaacaacgccgtgaacgtttactccgcgttttaaacatactgggattcttgcccgaacatttccgtcaacagattgattttgaaaagcacttcggacaattcaagaatcacagcgaaccgctgatagcctattgccctgatgcgacgggcaagaaggaatttctctttcgtcaatccttcgaagaaatgctgaacgaattccgtcaggttcatcccgagctcgttgcagaaggcaagaagataccctatgactggatcctctactacctgcgcaagaaggccttgactcaacctgtcagtcgggaagaacttgcctggattctcctaagtttcaacgcaaagcgaggctattaccaactccgcggcatgagtgatgagctgcaaacagccgacgaccaaaaacaattttgcgtactgacagtcatgcaggtaaatcagggcaaagaggtcaaagccggctcacagacctacgagtatcatatcgtctatgacaatggcaaggaggaaaccaaaaaaggcaaacaggctccctacccaattggccatcagtttgaagccatctgtacgaccaagaccaacaaagacggcactacgaccttcagcaccagcactcccgacccagaagactggacactggtcaagaagaagacggaacacgacatcaagttgagcggtaaaacagtgggtgcctacatctatgacgaaatactcgcccaaccttccgttaaggtacgcggcaaattaatccataccatcgatcgcagcttctaccgcaacgagatggaacagatactccgtgctcaaaccgccttccataaggaattgcgtgacgatgtcctcttgcgccgctgtgccaatgaattgtaccgccgtcctgagcgtcaacctcgcatcgaacaactggtgaaacagggattcctccatctgttggtagacgacgtattgttctaccaacgtccactgaaaagcaagaagagcgaaatcgctgactgtccgttcgaacaataccactatgtcaatcgctccacaggcgaatgtgttgacgaacccgtcaaatgtattccgaagtcacatcctctctttcaagaataccgtctgtggcaattcatccataacctccgcatctatcagaaagaagccgaggtcaacggccgcatggtacttaactacgatgtgaccgaccacttcctgcccaaccacgaagtgcgttgccagcttttcgactacctcaacgaacgtgctgacgtgaaggaatctgtcctgttaaagttcaagcccttcggtttaagcaagaaggccgaccttgaacgctatcgctggaactatcccagtgagaatacctatccctgtaacaagacactctacaccattccgaaggactaccgccgctattttaaccaaaagctttggcacattctctattccgtcagcgaccccgaacaaatagtcaaagccttgcgcagctttgctacagagcatcagattcccgatacagacgcttttgtagcatcactaacttcagtcgtcttctccgaaaaggactatggttccttctccgaaaaagccttgaagaagctccttcccttgatgcgttgcggtagccgttggcaatcatccgccatcgatgaagccacccaagaacgtattcagcacttcctgcacgagccgtcccacgaagatttctctgacagcgtacgtaaggcgttagccaactgccactgcatcgaagatttccaaggtctacccgtctaccaagcctgctatgccgtatacggccgacactctgaagccgccgacctcacagcgtggaagtcacctgacgaactcgcctacttcctgcgctacaccttcaagcaacactccctgcgcaatcctgtagtagaacgcattgtgctggaaaccctccgcatcgtcgaagacctttggcgcaaatatggcaagatggacgaaatccatgtcgaaatggggcgcaacctgaagcaaaatgccgaaggacgtaagcgcgattacgaccgcaatcaggagaatcaagctgccaattaccgtgcccgccgattgctacaagagtttgcccgttacgaaaccgacattgagaacctccgtccacactctccctatcagcaagacctcttccgactctacgaagaagaagtcctgggcaattatgccgacgaagtaaagaaggacaaacaaattgccaagaccattcagagcttagggcgtccactcgaagcctgcaaggtcaccgccagtgaagtacatcgctaccgcctttggttagaccaaaagtgtaagtctccttacacggggcaacccatctctcttgcccgcctctttacccgcgattacgagatagaacacgtcattcccaaaacgcgttactacaatgactcgatgaacaacaaggtcatctgcgaagcggaagtcaacaaggacaaaggcaacatgacgggatacgaatacatcctgcaacgtggcggaagcatcgtacagggcgctttcggcaagaccttcactatcttgaaacgcgaggaatacgaagactacattaacctccacttcaagcacaatcgtgccaagaaagccaacctcttgatggaggatgtgcctgcagagttctccgaacgcatgctcaacgatacccgctacatgagccgcgtcgtactttccctgctctccaaggtggtgcgcgatgacgacgaagtttcctccgtttcgaagcatgtactcccgaccaatggcagcatcacgacgcgcctcaagtcagactggggcatcaacgatgtgtggaacgacctcattgctccccgtttccagcgcatgaacgaacggatgcacaccgatgccttcggcgagatgcgcaatgagtcgggcaagcgtttcttccagccacgcctcccgctcgacattcctcagatagacaagaaacgcattgaccaccgccaccacgccatggatgccatcgtgattgcctgcaccacccgcaaccacatcacctacctcaactccgtttcctctcacgacggtgacaatgcgacccgcatcgacctacgcactaagctctgcctcaagcaccacaccgatgccaacggcaactaccagtggctcttcaagaagccttgggacagctttacacaggacgttcgcgccgcactctcgaacatcgtggtcagcttcaagcagaatctgcgtatactgacttccagcaaaaagggtggttcgtctatacgcaagccgctccacaaggaaacgttctcgggcaaagtccttctacaacaagtaaagaccatcagcctgaaagatgcacttgccgactggcatcagattaaggacaaaaccttgcgccaggaaataaagcgtttgcttgcagaagtctatcctgcgggcaatgtcagtcaactgatcaaacacttcaagttacaaaagaacctcttcaacggtaaagacatccgcaaggttgaggtctacacctacagccaaggtgaagaaacccaagtagctaaccgaaagttgctggacaagacactgacgctgaagcagattgagtcgattaccgacagcggcatccgcaagattctcatgcgtcacttagccaactatcaagacgctgctggcaaataccgtaccgaagaggccttctctcccgaaggactggctgaaatgaacgctcatatccgtgaactgaacgacggcaaaccgcatcagccggtttacaaggctcgtttttcggaaatccaagggcaaaagtttgctgtaggccagagcggtgccaaggccaagcagtttgtagaagcagccaagggaaccaaccttttctttgccatctatgccaacaaggacggaaagcgttcttacgaaacgattccgttgcaggatgtcatagcccgacgaaagcgaaaggaagaggtagcaccaagtgtcaacgaacatggtgaacgtctgctcttcaccttatctccaggtgatttggtttacctgcctatcgaagaaggtgtagtaccacaggtgttggataaaaagcgaatttacaaggtggtgtcttttagcaaacgtcagtgcttctttgttccgcagtcgttttcaaccactctttacgacaaatgtgaatggggcagcatgaataagatggagttgacagataataaggaaaacatcaaagccctttgcgtcaagctcaaagtcaaccgcttaggtgaaatcatagaaatcatcgacggacaatga

SEQ ID NO: 122 - DNA, 4329 bp, Unknown
  OMNI nuclease sequence
atgaaaaccattttgggattggaccttggtccgggaagcataggatgggctttggtgaacgtggaaaacggcaagcccaaaagtattataaaggcgggaagccgcataattcctatggatgcgggagaaatgagcgactacgaaagcggcaagctgcaatcatcggcatcggtgcgtactgcattccggggaatgcgccgcttgtatgagagggcggcgcttcgcagggagaggcttcttagggtactgaatgttctcggctttttgccgcagcattaccgcgaccaaatagattttggcgaacatccgggaaaattcaaaaaccacggcgagccgctgctgccatacaggaaaaacgaggcagggaaaagcgagttcatctttcagccgtcattcctcgaaatgctcgaagatttcaagaaaaacaatccgcaggtcttggatgacggcagacttattccccgcgactggactctttattattgccgcaagaaagctcttgaccgtgaaatctcgcgtgaagaactggcttggatattgctgaacgccaactccaaacgcggatattatcagcttgacgaggaaaaaaccgaaaaatcaaatgcggagaaggaataccgccgtgccaaggttcttgatgtggaaaggttggaagaagaccgcaagcagaaaggcttttacttctacaagataacatacgatggagggcttacgcaaacgaggaaatgcaaaatgcagccgtggcgcgttggcgacgaggtggatttgattataaccacgccgcttgacaagaacggcaagccgaaaaaagacgaagacggcggaataaggcaaaccctcagcagtcccaaagaggacgactgggggcttgtgatgcaaaagacacaggccgggatagaccacagcaattgcaccgtgggcgaatatatctacaacagtctccttgaaaatccgtccgaaaaggtgaggggtggaattgtaaagacaatcgagagacattattatatggaagagcttagaaagatacttgagtcgcaggcaaggttcatacccgagctgtgtgatcacgaactctacatgaaatgcgtaagggaactttaccgtaacaatgaagctcacgtgaacgagttgaaacgcggcaatattgttgactttctcataaaagatgtaatctactatcagcgtccgcttaaaagcaagaaaagctgcatagccgattgcccgtacgagagctacacttatgtggacaaggaaaccggggagataaaaaagcgtcccttgaaggttatgcccaagtcccatccgctgtttcaggagttccgcctgtggcagttcatacgcaacataaggattaccgagaacgagaagatagtggacggacgcaagtattttggttatgatgtaacggcaaaatatctcggaacgcccgaagacgtgtgccggctttacgaaaaactgtccgggtatgagaacatagccgaaagcatagtgttgaagtcgttggggcttaatgcaaagatgttcaaatggaactacggctcaaaaaaagagtttcccggcttgaaaacgcatcacgagtttgccacgagaatagccaaacttgaaaaagcaagggaacttacgcaaaaagaagaatacaagctgtggcatatactctattccgtgagcgacagagacgagcttgaaaaagccctgaagcatttcgccgaagaatgtggctttgacgggcagagtttttacgaaaaattcaagaccgttccgaatatgcggggcgattacgcctcatattccgaaagggctgtaaagcgtttgctccagcttatgcgctcagggaaatattggaacgaaaaggagattgacgaggcaacgctcaagcggataaatgcaataatagaatacggctatagcccttatgaggagttttcggagttcaagcgggtggacgattttcaatatttgcagctttcagacgcttgttatgtggtttatgggcgacattccgaaaacgccgacaacagtgtgtggaattcgcccgaggaaatagacgaatatatcggaggcgagttccgcaaaaactcaatgcgaaaccccgtggtggagaaagtggtggctgaaacgctaaaggttgtgagggatatatggaaaacctacggcaaaccggcggaaattcatgtggagatggcgcgaagccttaaagaccctaacgacaaacgcaaggaagccacggaaagaatggcagcaaaccgaaaggaaacaatagacgtgcgtgaaaaactgcaggaactcaaagacgaacacaaggcggacaatataaatcccaattcctttatacatatattgaaatacaagctgtggaaagagcaggggggccagtcgccatacacagggaaaagcatatcgatagcaagactcttcaccgatgaataccaagttgaccacataattccccaaaagcggtattacgacgattctttcacaaacaaggaggtgtgcgagagcgcggttaatttggacaaaggcgcacggcttgcatacgagtacatacttgccgaaggcggaaaggagataaatgtaactataaacggcaagcacgagaaaattgctatattacccaaggaacaatatgaggaatgggtgaaaaaacattgcgtgagagaaaacggaatcggcagaaagggcaaaaacctcatgatgacggatgtaccggcttcgttcaacgcctcgcagcttaacaacacccgctacatagcccgcaagacggcggaaatcctgtctcacatagtgcgtgagggtagcgaccccggcgcgcgttccaagaacataataatgacaaacggaagcataaccgaccgcttaaagaaagactggggactgaaacagatttggaacgaacttatgcagccgagattcgaacgccttaacgacaaaacccaaagcaacgactatggcgaggatgttgtagacgctcatggcagacactacttccaaacaaaagtgccggaggggcttgccgaaaaattcgacatcaagcgaatagaccaccgccatcacgcaatggatgcgatagtcatagcctgcacatctctaaaccatattaattatatgaataacctaagtggcggggaaaaggaacgctatgacctgcgcagggtgttgtgcgaaaaagacagcagagcgtttttgaagccttgggaaacgtttacgcaggattctcgcgaagctatgaacaacattgtcgtgagcttcaagcaaaacctgcgcattgtgagccgcgcaagcaactattacagccattatgttgacggcaaaaagataattgaaaggcaaaccaagggcgagcatttctctattcgcaagccgcttcacaaagccacgtattcgggactcgtaaggctgccatacactaaaatggagaaaatagagaacaccatagacaatcccgagcagatagtagacaaaagcatacgcaaaggactgaaggaaattcttgtccaatataatggcgctgccgacaaaaagaaaatcaaaaagtatttcaaggacagggactataagctgaacggcgtggatgtggctaaagttgaagtgcgcattgtgccggaacaggcagggcattccgcacaccgcacggttcttggctcaataacaaacagaaagcagcttgattccatcacggattccggcataaagaaaatcctgcttaatcatttggaaaactacggcggcaattacgaggaggcgttctcgccggagggaatcagcagcctgaatgacaacataaggcagttgaatggcgggcgcgaccataagccggtaaaatgcgtaagggtttcggaaaaattctctttgaagttccctgtaggacaaagtggctctaaaataaaaacttatgtagaaacagaaaaagggacaaaccttttctttgccatatatgtagatgaagaaggaactcgtgtgtttgaaactatacctttgaacgttgtagttgaaagaaaaaaggatcatcttcccgcggtgccggaatgcaatgaaaagggagacaaacttctgttttccctttcgccaggcgatttggtatatgtccccgaagagggtgagcatattgcaatgccgcttgaccctaagtgcatatataaaatggtgtctgcaaatagtggagtgtgctattttgttcctcaaaatgttgccactcctatagcggacaaaatagaatttggtattaaaaataagtcagaacgtgatttgaatggcaatcaaatcaaaaaagtttgcctgaaacttgaaaccgaccgtttgggaaacatcataaagattacaggaaatgattaa

SEQ ID NO: 123 - DNA, 4329 bp, Unknown; identical to SEQ ID NO: 122
  OMNI nuclease sequence

SEQ ID NO: 124 - DNA, 4329 bp, Unknown
  OMNI nuclease sequence
atgaaaactgtcttaggattggaccttggtccgggaagcatagggtgggctttggtgaacacggaaaacggcatgcctgaaagcataataaaggcgggaagccgcataattcctatggacgcgggggaaatgagcgactacgaaagcggaaaactgcagtcgtcggcatcggtgcggactgcattccggggaatgcgccgcctgtacgagagggcggctctccgcagggagaggcttttaagggtgctgaatgttctcggctttctgccgcagcactatcgcgaccaaatagattttgacttacacccgggaaaattcaaagaccacggcgaaccgctgctgccatacaggaaaaacgaggctgggaaaagcgagttcatatttcagccgtcatttctcgaaatgctcgaagatttcaggagaaacaatccgcaggtcttggagggcggcagacttattccccgcgactggactctttattattgccgcaagaaagctcttgaccgtgaaatctcgcgtgaggaactggcttggatattgctgaacgccaactccaagcgcggttattaccagcttgacgaagaaaatgccgaaaaatcaaacgcggagaaggaataccgccgtgcaaaggtggttggcgtggaaaggttggaggaggaccgcaagcagaaaggtttttacttttacaagataacatacgagggagggctgacgcagacgaggaaatgcaaaatgcagccgtggcgcgttggcgacgaggtggatttgattataaccacgccgcttgacaagaacggcaaaccgaaaaaagatgaaaacggtgaaataaagaaaaccatccgcagtcccaaggaggacgattggggacttgtaatgcaaaagacacaggcaggcatagaccacggcaatggcactgtgggcgaatacatctacaacagccttcttgaaaatccgtccgagaaggtgaagggcggaattgtaaagactattgagagacattactataaggatgagctgagaaagatacttgaggcgcagtcgaggttcatacccgagttgcaggatcacggactttacattaaatgtgtaaaggaactttaccacaacaacgaatcccatgcaaacgagttgcggcataggaacattatagacttcctcattaacgatgtgatttactaccagcgtccgctcaaaagcaagaaaagttgcgtcgccgattgtccttatgagagctacacttatgtggataaggaaacaggcgagataaagaaacgccccttgaaggtgatgcccaagtcccatccgctgtttcaggagttccgcctgtggcagttcatacgcaacctaagggttaccgagaacgagaagattgtggacgaacgcaggttttttggttatgatgtaacggcaaaatatatcggtacgcccgaggatgtgtgccggctttacgaaaaactgtcgggatatgcggacataagcgaaagcaaggttttgaaggcgttgggacttaatgcaaagatgttcaaatggaattacggctccaaaaaggagttccctggtttgaaaacgcaccacgaatttgcatcgagaattgccaaacttgaaaacgcaagggaacttacgcaaaaagaagaatacaagctgtggcacatactctattccgtgagtgacagggacgaacttgagaaagccctgaagcactttgccgaagaatgcgagtttaatccgcaaaatttctacgagcaattcaaggccgctccgaagatgcggggcgattatgcctcttactccgaaagggcagtcagacgtctgctcccgcttatgcgcaccgggaaatattgggacgaaaaagagatagacgcggcaacgctcaagcggataaacgccataattgcggacggctacaacccatgtgaggatttccccgagttcaagcgggtgggggatttccaaaatttgcagctttccgacgcttgttatgtggtttacgggcggcattccgaaaacgccgacaacagtgtgtggacttcccccgaggaaattgacgaatatctttgcggcgagtttcgcaaaaactcaatgcgaaaccccgtggtggagaaggtggtggcggaaacgctaaaggttgtgagggacatctggaaaacctacggcaagccggcggaaatccatgtggagatggcgagaagccttaaagaccccaacgacaagcgcaaggaagccacagaaagaatggcggcaaaccgaaaggacacaataggcgtgcgtgagaagttgcaggaactcaaagacggacacaaggcggacaacgtgaatcctaactcctcaatacatatcttgaaatacaagctgtgggaagaacagggaggcctgtcgccatatacagggaaaagaatatcaatagcaagactcttcaccgacgaatatcaaatagaccacataatcccccaaaagcggtattacgacgattctttcacaaacaaggtggtgtgcgagagcacggttaatttggacaaaggcgcacggcttgcatacgagtacatacttgccgaaggcggaaaggagataagcgtaacggtaaacggcaagcacgagagaactattatattccccaaggaacaatacgaggaatgggtgaaaaagaattacatgaaggaaggcgtagtcggcagaaagggcaaaaacctcatgatgacggatgtcccggcttcgttcaacgcatcgcagcttaacaacacacgctacattgcacgcaagacggcggaaatcctgtcccgcatagtacgtggcgaaaacgaccagggggcgcgttccaaaaacataataatgacaaacggaagcatcaccgaccgcctgaagaaagactgggggctgaaacagatttggagcaagcttatgcagccaagatttgaacgccttaacgacaaaacccaaagcaatgactatggagaggaggttactgacagtaatggcaggcgctacttccagacaagagtgccggaggagcttgccgaaaaattcgacataaagcgaatagaccaccgccaccacgcaatggacgcgatagtcatagcctgcacttccctgagccatattaattatatgaataacctgagcggcggggaaaaggagcgccatgacctgcgcagggtgttgtgcgaaaaagacagcagggcgtttttgaagccttgggaaacgtttacgcaggattcccgcgaggctctgaacaacattatagtgagcttcaagcaaaacctgcgcatcgtgagccgcgcaagcaactattaccgccattatgttgatggcaaaaaggtaacggagcgacaaaccaaaggcgaacatttttcaaatcgcaagccgcttcacaaactcacgtattcgggactcgtaaggctgccatacaccaaaatggagaaaatagagaacaccatagacaatcccgaacagatagttgacaagagcatacgcaaagggttgaaggaggttcttgcccaatataatggctctgccgacaagaagaaaatcaagaagtatttcaaggacagggactacaagctgaacggcgtgtatgtggctaaagttgaagtgcgcatagtgccggaacaggcaaggcattccgcacgccgcacggctcttggcttaataaaaaacagaaagcagttggattccattactgatacaggcataaagaaaatcctgctcaatcatttggaaaactacggcggcaattacgaggaggcgttctcaccggagggaatcagcagtttgaatgacaacataaggcagcttaatggcgggcgcgaccataagccggtaaaatgcgtaagggtttcggaaaaattctctttgaagttctctgtaggacaaaactgctctaaaataaaaacttatgttgaagctgcggacaatactaatcttttcttcgccatatatgttgacgaggaaggaaagcgggcgttcgagacgatacctctgaacgttgtcgttgaaagaaaaaggcagcatctttccgcagtgccagaacacaatgacaaagagaacaaactcctgttttccctttcacccggcgatttggtatatgtccccgaagagggcgagcatatcgcaatgccgcttgattatgaacgcatatacaaaatgcaatcaactgatagtaataaatgtttttttgtgcctcaatatgtagctgctcgtatagcagataaaattgaatacggtcctaaaaacaaatcagaacgtgatttgaatggcaatcaaatcaaaaaagtttgcctgaaacttgaaaccgaccgtttgggaaacatcataaagattacaggaaatgattaa

SEQ ID NO: 125 - DNA, 4329 bp, Unknown
  OMNI nuclease sequence
atgaaaactatcttgggattagaccttgggccgggaagcatagggtgggctttggtgaacacggaaaacggcaagccggaaagcataataaaggcgggaagccgcataattcctatggacgcaggggaaatgagtgactacgaaagcggcaagctgcaatcgtcggcatcggtgcggactgcattcaggggaatgcgccgcctgtacgagagggcggctctccgcagggagaggcttttaagggtgctgaatgttctcggctttctgccgcagcactatcgcgaccaaatagattttgacgaacatacgggaaaattcaagaaccacggcgaaccgctgctgccatacaggaaaaacgagactgggaaaagcgagttcatttttcagcagtcatttcttgaaatgctcgaagatttcatgaaaaacaatccgcaggtcttggagggcggcagactcattccccgcgactggactctttattattgccgcaaaaaggctcttgaccgtgaaatctcgcgtggggaactggcttggatattgcttaacgccaattccaagcgcggctattaccagcttgatgaggaaaaaacagaaaaatcaaacgcggaaaaggaataccgccgtgctaaggttgtgagtgtggaaaagcaggatgaggaccggaaacaaaaaggctatttcttctataagataacatacgaaggcggactgacgcaaacgaggaaatgcaaaatgcagccgtggcgcgtaggcgactatgtggatttggttataaccacgccgcttgacaataacggcaagccgaaaaaagacgaggacggcgaaataaggaaaaccctcagcagtcccaaagaggacgattggggacttgtgatgcaaaagacacaggcaggcatagaccacggcaatggcactgtgggcgaatacatctacaacagccttcttgaaaatccgtccgagaaggtgaagggcggaattgtaaagactattgagagacattactataaggatgagctgagaaagatacttgaggcgcagtcgaggttcatacccgagttgcaggatcacggactttacattaaatgtgtaaaggaactttaccacaacaacgaatcccatgcaaacgagttgcggcataggaacattatagacttcctcattaacgatgtgatttactaccagcgtccgctcaaaagcaagaaaagttgcgtcgccgattgtccttatgagagctacacttatgtggataaggaaacaggcgagataaagaaacgccccttgaaggtgatgcccaagtcccatccgctgtttcaggagttccgcctgtggcagttcatacgcaacctaagggttaccgagaacgagaagattgtggacgaacgcaggttttttggttatgatgtaacggcaaaatatatcggtacgcccgaggatgtgtgccggctttacgaaaaactgtcgggatatgcggacataagcgaaagcaaggttttgaaggcgttgggacttaatgcaaagatgttcaaatggaattacggctccaaaaaggagttccctggtttgaaaacgcaccacgaatttgcatcgagaattgccaaacttgaaaacgcaagggaacttacgcaaaaagaagaatacaagctgtggcacatactctattccgtgagtgacagggacgaacttgagaaagccctgaagcactttgccgaagaatgcgagtttaatccgcaaaatttctacgagcaattcaaggccgctccgaagatgcggggcgattatgcctcttactccgaaagggcagtcagacgtctgctcccgcttatgcgcaccgggaaatattgggacgaaaaagagatagacgcggcaacgctcaagcggataaacgccataattgcggacggctacaacccatgtgaggatttccccgagttcaagcgggtgggggatttccaaaatttgcagctttccgacgcttgttatgtggtttacgggcggcattccgaaaacgccgacaacagtgtgtggacttcccccgaggaaattgacgaatatctttgcggcgagtttcgcaaaaactcaatgcgaaaccccgtggtggagaaggtggtggcggaaacgctcaaggtcgtaagggacgtttggaaaacctacggcaagccggcggaaattcatgtggagatggcgcgaagccttaaagaccctaacgacaaacgcaaggaagccacggaaagaatggcagaaaacaggagggatacaatagacgtgcgcgagaaactgcaggaactcaaagatgggcacaaggcggacaatgtgaatcccaattcctcaatacatatattgaaatacaaactgtggaaagagcagggaggccagtcgccatatacagggaaaagcatatcgatagcaaggctcttcaccgatgaataccaagttgaccacataatcccccagaaacggtattacgacgattctttcacaaacaaggtggtgtgcgagagcgcggttaatttggacaaaggcgcacggcttgcatacgggtacatacttgccgaaggcggaaaggagatagacgtaacggtaaacggcaagcgcgagaaaactgccatattccccaaagaacaatatgaggaatgggtgaaaaagcattgcgtgagggaaaacggaatcggcagaaagggcaaaaacctcatgatgacggatgtcccggcttcgttcaacgcctcgcagcttaacaacacccgctacatagcccgcaagacggcggaaatcctgtcccacatagtgcgtgagggtagcgaccccggggcgcgttccaagaacataataatgacaaacggaagcatcaccgaccgactgaagaaagactggggactgaaacagatttggagcgaacttatgcagccgaggtttgaacgccttaacgacaaaacccaaagcaatgactatggcgaggagattacggacagtaatggcaaacgctacttccagacaagagtgccggaggtgcttgccgaaaaattcgacatcaagcgaatagaccaccgccaccacgcaatggacgcgatagtcatagcctgcacttccctgagccatattaattatatgaataacctgagcggcggggaaaaggaacgctatgacctgcgcagggtgttgtgcgaaaaagacagcagggcgtttttaaagccttgggaaacgtttacgcaggattcccgcgaggctctgaacagcattatagtgagcttcaggcaaaatctgcgcatcgtgagccgcgcaagcaactattacaaccattatgttgacggcaaaaaggtaacggaaaggcagaccaagggcgagcatttctcaatacgcaaaccgcttcacaaagccacgtattcggggctcgtaaggctgccggaaacaaaaatggagaaaatagagaacaccatagacaaccccgagcagatagttgacaaaagcatacgcaaagggttgaaggaggttcttgcccaatacaatggcactgccgacaagaagaaaataaagaagtatttcaaggacagggactacaagctgaacggcgtggatgtgtcgaaagtgaaaatacgctttgtgccggaacaggcaaggcattccgcacaccgcacggctcttggctcgataacaaacaagaagcagcttgattccatcacggattccggcattaggaaaatcctgctcaaccatctggaaaactacggcggcaattacgaggaggcgttctcgccggagggcataagcagcttgaacgacaacataaggcagcttaatggcggacgcgaccataagccggtaaaatgcgtaagggtttcggaaaaattctctttgaagttctctgtaggacaaaactgctctaaaataaaaacttatgttgaagctgcggacaatactaatcttttcttcgccatatatgttgacgaggaaggaaagcgggcgttcgagacgatacctctgaacgttgtcgttgaaagaaaaaggcagcatctttccgcagtgccagaacacaatgacaaagagaacaaactcctgttttccctttcacccggcgatttggtctatgtccccgaagagggcgagcatatcgcaatgccgcttgattatgaacgcatatacaaaatgcaatcaactgatagtaataaatgtttttttgtgcctcaatatgtagctgctcgtatagcagataaaattgaatacggtcctaaaaacaaatcagaacgcgacttgaatggcaatcaaatcaaaaaagtttgtctgaaacttgagatcgaccgcttgggaaacatcataaagattacaggaaatgattaa

SEQ ID NO: 126 - DNA, 3744 bp, Unknown
  OMNI nuclease sequence
atgaaagtactcggtcttgatctcggggttggctcagtcggatggtgtctgattgaagtcgacggtaaatacaatcccattgaaatactcggtatgggtagccggatattgagtctcactcccgatgaatcctcaaattttgacaggggaaatggcgaatccgtatgcgctcaacgtacgttccgtcgcactgcccgaaaaatgctctgtcgctacaagatgcgtcggcgcctgttgcgttcgcagctggcgtttctgggtatgcttgactcggcagattccttgaacagcctgagtccactggaattgtggaaactgagatccgatgcggccacgtcaggtgtgcggcttacattgccggaaatcggccgtgtacttctgcatcttaatcaaaagcgaggctataaacatgcgaaaactgatgtggctgatgcgaaacagactgaattcgttcaggacgttaaccgtaattatgccgagattcgtgctgaagggaaaacttacggtcaacatttctatgaacgacttttagccacagctgctaccaccgacaaaggtgcgaaagtggcaaccttccgtatccgcgagaatgtgtttccccgtcaggcctacgaggatgaattcgatacaatcatgcgcgttcagcgcaaattttatccggagatactgaccgacgaagttatcgcaggattgcgtaatgcaattttcttccagcgtccgctcaaatcatgcaagcacctggtgagcgtatgcgaattcgagggaaaaaactattgtacggccgatggccgcgaggtatttggcggcccgaaggttgctccgcgcacttcgcctctagcgcaggtgtgccgcctatatgaggtaatcaacaatattcgtctggtcaacgtacgcaataaggatgccgcccccatacctgacggtatcgtttcttcggaagcgagaaagagccagtatcagtttgtatttactgcggaggaacgtgaaagaatctatgaattcctcaacacccacgagaagatgaccgtgacagacctccttaaactcatcggtttgaagaggggcgacgggttcagacccgaccagtcgctcgggaaggggattccgggcaacaagacctatactgccctcttcaacgctcttgagggggtgggccgtcgcgatgagttgctaaggttcaatcttagattcatcgatgggaatgccgactccgccacgggcgacgtgcgtcgcgttgtatctcccgactttatcaatgaaccgctctacaggctttggcatacggcttattccatcgccgaccgcgatgaactggctgctgcgctcgccaagaacttcggaatcacagatccggctgttgtagaccgtatattcgccattgacttcaccggcgcaggtttcagcaaccgttcggcacgcttcatgcgcagaattatcccatatctcgccgaggggatggtctattccgacgcggctgccgcagccggtgtcaaccattcggcgtctgtgacagcagaggaaaatgccacgcgcgtcgtcgtcgaccatctcgatattattaagaaaggcagtctgcggcagccggtcatcgaaaaaattctcaaccagatgattcatgtggtgaatagccttatcgcacaatttggcccgatagatgaggtgcgcgtggagctggcccgctcgctgaaacagagcgctaaggagcgttccgatgcctctaccgccatcaatgcccgcgagaaagaaaacaaagccctcggcgagaagattgctgaatacgggctgacgccctcgcgaagaaccatccagaaactgcgtttgtgggaggagacggagcatgtgtgcatgtactgcggccagcccgtatcggctacggaattccttacgggggatgccgaggtcgaacatatcattccgcgttcgatattcttcgacgacagtctctcgaacaagacatgcgcctgccgtcggtgcaacaaggccaagaacaatcgtaccgcctacgattttatgaaggaggatcataccgatgaggaattccgcgcctatatagcccgcgtggaggctatggcggaagcaaagaagatttcacggacgaagcgcgaccgtctgctctgcccgaaagaggaaattccttcagacttccttgaacgcgacctgcgccagtcgcagtatatcgcccgcaaagccatggagatacttcatacggttgtacgaaacgtttgggcgacatccggttcagtgacggacttcttccgtcatcagtggggatacgatcgcattctccatgaccttagcctggataaatatgcgtcggccggtcttgtagaggaagttgaatacgagcataaggggcagacccaccgtcgccagcagataaagaactggagtaaacgatttgaccaccgccatcatgctgtcgatgctcttgtaattgctctaacgcgtcagggctacgtgcagcgactcaacaacctcaatgccgagcatggaaacatccatgccgagcttgtgaaggaaaatgcagatttcacacgcaataaatcgcagcttgaactctgggcttcgacgcggccacgtttcgatattgaaacggtgcgtaaggccgtggaggggattgcagtttcgttcaagtcgggtaagaaactcactacgccaggcaagagggctataatgcgtggtggaaaaaagactgtggttcaggataaactggtcataccgcgtggggccctccatcaggagacggtatatgggcttatccgacttcccgacgggcgaaaaaccttgaaatatgcttttgatacgccgacccttgtaagcgatccggctgcccgcaaagcaatccaggccatcttggagcattttggcggcaatgtaaaaaaagctctcaagagtcttcccggagaaggtcttgaggtgatgagaaaggggaagagagaaaatgtcactgaggtgtcttgccatcgcttcgaatatgtggtgcgtaaaagtgtcgctgcgctaaaatacaaggatatactgaaaattgtcgatggagccgtaaggcggagcgtcgaaggccgcttcgccgaatgcggcaataaggatagcgaatatcagaagagtttcgcggaacggcccctcatacttccgggcgcgtttactcctatacgtactgtgcggattgccacaggcttaaagccgaaatccatggctgcagtgcgccgcgattcttcgggcaatcccataggttacgctaagaccgccagtaaccatcatatagccatctatgaggatagcgtaggcaggaaactctgctctgtgacctcgatgtgggatggtgtgttgcgacgtctcaatggcattcctgtgatagtgaagcatccggacgatgcctggaacttactgatgggtattgccgacgaggatgtgcgcgagcggcttgccgcatctctgccacgcccggactggaagttccttatgagtctgcagatgaatcagatgtttgtgctcggcctttcggaggatgaattcaacgatgccgtcagaaacaacgaccgagcgactcttgcctcccatctctatagagtacagaaactcgctgacaatgatttctctctgcgaagacatactaacaccactgccgatgatacgacggagtttaggaagatgttagatgtctatcgcttgtcgacgcaagcctttttaaacctcaagccacacaaggtgaaaattaccccgaccggcgattttgcttatgattaa

SEQ ID NO: 127 - DNA, 3744 bp, Unknown
  OMNI nuclease sequence
atgaaagtactcggtcttgatctcggggttggctcagtcggatggtgtctgattgaagtcgacggtaaatacaatcccattgaaatactcggtatgggtagccggatattgagtctcacacccgatgaatcctcaaattttgacaggggaaatggcgaatccgtatgcgctcaacgtacgttccgtcgcactgcccgaaaaatgctctgtcgctacaagatgcgtcggcgcctgttgcgttcgcagctggcgtttctgggtatgcttgactcggcagattccttgaacagcctgagtccactggaattgtggaaactgagatccgatgcggccacgtcaggtgtgcggcttacattgccggaaatcggccgtgtacttctgcatcttaatcaaaagcgaggctataaacatgcgaaaactgatgtggctgatgcgaaacagactgaattcgttcagggcgttaaccgtaattatgccgagattcgtgctgaagggaaaacttacggtcaacatttctatgaacgacttttagccacagctgctaccaccgacaaaggtgcgaaagtggcaaccttccgcatccgcgagaatgtgtttccccgtcaggcctacgaggatgaattcgatacaatcatgcgcgttcagcgcaaattttatccggaaatactgaccgacgaagttatcgcaggattgcgtaatgcaattttcttccagcgtccgctcaaatcatgcaagcacctggtgagcgtatgtgaattcgaggggaaaaactatcgtacggccgatggccgcgaggtatttggcggcccgaaggttgctccgcgcacttcgcctctggcgcaggtgtgccgcctatatgaggtaatcaacaatattcgtctggtcaacgtacgcaataaggatgccgcccccatacctgatggtatcgtttcttcggaagcgagaaagagccagtatcagtttgtatttactgcggaggaacgtgaaagaatctatgaattcctcaacacccacgagaagatgaccgtgacagacctccttaaactcatcggtttgaagaggggcgacgggttcagacccgaccagtcgctcgggaaggggattccgggcaacaagacctatactgccctcttcaacgctcttgagggggtgcgacgtcgcgatgagttgctaaggttcaatcttagattcatcgatgggaatgccgactccgccacgggcgacatgcgtcgcgttgtatctcccgactttatcaatgaaccgctctacaggctttggcatacggcttattccatcgccgaccgcgatgaactggctgctgcgctcgccaagaacttcggaatcacagatccggctgttgtagaccgtatattcgccattgacttcaccggcgcaggtttcagcaaccgttcggcacgcttcatgcgcagaattatcccatatctcgccgaggggatggtctattccgacgcggctgccgcagccggtgtcaaccattcggcgtctgtgacagcagaggaaaattccacgcgcgtcctcgtcgaccatctcgatattattaagaaaggcagtctgcggcagccggtcatcgaaaaaattctcaaccagatgattcatgtggtgaatagccttatcgcacaatttggcccgatagatgaggtgcgcgtggagctggcccgctcgctgaaacagagcgctaaggagcgttccgatgcctctaccgccatcaatacccgcgagaaagaaaacaaagccctcggcgagaagattgctgaatacgggctgacgccttcgcgaagaaccatccagaaactgcgtttgtgggaggagacggagcatgtgtgcatgtactgcggccagcccgtatcggctacggaattccttacgggggatgccgaggtcgaacatatcattccgcgttcgatattcttcgacgacagtctctcgaacaagacatgcgcctgccgtcggtgcaacaaggccaagaacaatcgtaccgcctacgattttatgaaggaggatcataccgatgaggaattccgcgcctatatagcccgcgtggaggctatggcggaagcaatgaagatttcacggacgaagcgcgaccgtctgctctgcccgaaagaggaaattccttcagacttccttgaacgcgacctgcgccagtcgcagtatatcgcccgcaaagccatggagatacttcatacggttgtacgaaacgtttgggcgacatccggttcagtgacggacttcttccgtcatcagtggggatacgatcgcattctccatgaccttagcctggataaatatgcgttggccggtcttgtagaggaagttgaatacgagcataaggggcagacccaccgccgccagcagataaagaactggagtaaacgatttgaccaccgccatcatgctgtcgatgctcttgtaattgctctaacgcgtcagggctacgtgcagcgactcaacaacctcaatgccgagcatggaaacatccatgccgagcttgtgaaggaaaatgcagatttcacacgcaacaaatcgcagcttgaactctgggcttcgacgcggccacgtttcgatattgaaacggtgcgtaaggccgtggaggggattgcagtttcgttcaagtcggctaagaaactcactacgccaggcaagagggctataatgcgtggtgggaaaaagactgtggttcaggataaactggtcataccgcgtggggccctccatcaggagacggtatatgggcttatccgacttcccgacgggcgaaaaaccttgaaatatgcttttgatacgccgacccttgtaagcgatccggctgcccgcaaagcaatccaggccatcttggagcattttggcggcaatgtaaaaaaagctctcaagagtcttcccggagaaggtcttgaggtgatgagaaaggggaagagagaaaatgtcactgaggtgtcttgccatcgcttcgaatatgtggtgcgtaaaaatgtcgctgcgctaaaatacaaggatatactgaaaattgtcgatggagcagtaaggcggagcgtcgaaggccgcttcgccgaatgtggcaataaggatagcgaatatcagaagagtttcgcggaacggcccctcatacttccgggcgcgtttactcctatacgtactgtgcggattgccacaggcttaaagccgaaatccatggctgcagtgcgccgcgattcttcgggccatcccataggttacgctaagaccgccagtaaccatcatatagccatctatgaggatagcgtaggcaggaaactctgctctgtgacctcgatgtgggatggtgtgttgcgacgtctcaatggcattcctgtgatagtgaagcatccggacgatgcctggaacttactgatggatattgccgacgaggatgtgcgcgagcggcttgccgcatctctgccacgcccggactggaagttccttatgagtttgcagatgaatcagatgtttgtgctcggcctttcggaggatgaattcaacgatgccgtcagaaacaatgaccgagcgactcttgccgcccatctctatagagtacagaaactcgctgacaatgatttcttcctgcgaagacatactaacaccactgccgatgatacgacggagtttaggaagatgttagatgtctatcgcttgtcgacgcaagcctttttaaacctcaatccacacaaggtgaaaattaccccgaccggcgattttgcttatgattaa

SEQ ID NO: 128 - DNA, 3744 bp, Unknown
  OMNI nuclease sequence
atgaaagtactcggtcttgatctcggggttggctcagtcggatggtgtctgattgaagtcgacggtaaatacaatcccattgaaatactcggtatgggtagccggatattgagtctcacacccgatgaatcctcaaattttgacaggggaaatggcgaatccgtatgcgctcaacgtacgttccgtcgcactgcccgaaaaatgctctgtcgctacaagatgcgtcggtgcctgttgcgttcgcagctggcgtttctgggtatgcttgactcggcagattccttgaacagcctgagtccactggaattgtggaaactgagatccgatgcggccacgtcaggtgtggggcttacattgccggaaatcggccgtgtacttctgcatcttaatcaaaagcgaggctataaacatgcgaaaactgatgtggctgatgcgaaacagactgaattcgttcagggcgttaaccgtaattatgccgagattcatgctgaagggaaaacttacggtcaacatttctatgaacgacttttagccacagctgctaccaccgacaaaggtgcgaaagtggcaaccttccgcatccgcgagaatgtgtttcctcgtcaggcctacgaggatgaattcgatacaatcatgcgcgttcagcgcaaattttatccggaaatactgaccgacgaagttatcgcaggattgcgtaatgcaattttcttccagcgtccgctcaaatcatgcaagcacctggtgagcgtatgtgaattcgaggggaaaaactatcgtacggccgatggccgcgaggtatttggcggcccgaaggttgctccgcgcacttcgcctctggcgcaggtgtgccgcctatatgaggtaatcaacaatattcgtctggtcaacgtacgcaataaggatgccgcccccatacctgatggtatcgtttcttcggaagcgagaaagagccagtatcagtttgtatttactgcggaggaacgtgaaagaatctatgaattcctcaacacccacgagaagatgaccgtgacagacctccttaaactcatcggtttgaagaggggcgacgggttcagacccgaccagtcgctcgggaaggggattccgggcaacaagacctatactgccctcttcaacgctcttgagggggtggaccgtcgcgatgagttgctaaggttcaatcttagattcatcgattggaatgccgactccgccacgggcgacatgcgtcgcgttgtatctcccgactttatcaatgaaccgctctacaggctttggcatacggcttattccatcgccgaccgcgatgaactggctgctgcgctcgccaagaacttcggaatcacagatccggctgttgtagaccgtatattcgccattgacttcaccggcgcaggtttcagcaaccgttcggcacgcttcatgcgcagaattatcccatatctcaccgaggggatggtctattccgacgcggctgccgcagccggtgtcaaccattcggcgtctgtgacagcagaggaaaatgccgcgcgcgtcctcgtcgaccatctcgatattattaagaaaggcagtctgcggcagccggtcatcgaaaaaattctcaaccagatgattcatgtggtgaatagccttatcgcacaatttggcccgatagatgaggtgcgcgtggagctggcccgctcgctgaaacagagcgctaaggagcgttccgatgcctctaccgccatcaatgcccgcgagaaagaaaacaaagccctcggcgagaagattgctgaatacgggctgatgccttcgcgaagaaccatccagaaactgcgtttgtgggaggagacggaacatgtgtgcatgtactgcgggcagcccgtatcggctacggaattccttacgggggatgccgaggtcgaacatatcattccgcgttcgatattcttcgacgacagtctctcgaacaagacatgcgcctgccgtcggtgcaacaaggccaagaacaatcgtaccgcctacgattttatgaaggaggatcataccgatgaggaattccgcgcctatatagcccgcgtggaggctatggcggaagcaaagaagatttcacggacgaagcgcgaccgtctgctctgcccgaaagaggaaattccttcagacttccttgaacgcgacctgcgccagtcgcagtatatcgcccgcaaagccatggagatacttcatacggttgtacgaaacgtttgggcgacatccggttcagtgacggacttcttccgtcatcagtggggatacgatcgcattctccatgaccttagcctggataaatatgcgttggccggtcttgtagaggaagttgaatacgagcataaggggcagacccaccgccgccagcagataaagaactggagtaaacgatttgaccaccgccatcatgctgtcgatgctcttgtaattgctctaacgcgtcagggctacgtgcagcgactcaacaacctcaatgccgagcatggaaacatccatgccgagcttgtgaaggaaaatgcagatttcacacgcaacaaatcgcagcttgaactctgggcttcgacgcggccacgtttcgatattgaaacggtgcgtaaggccgtggagcggattgcggtttcgttcaagtcgggtaagaaactcactacgccaggcaagagggctataatgcgtggtggaaaaaagactgtggttcaggataaactggtcataccgcgtggggccctccatcaggagacggtatatgggcttatccgacttcccgacgggcgaaaaaccttgaaatatgcttttgatacgccgacccttgtaagcgatccggctgcccgcaaagcaatccaggccatcttggagcattttggcggcaatgtaaaaaaagctctcaagagtcttcccggagaaggtcttgaggtaatgagaaaggggaagagagaaaatgtcactgaggtgtcttgccatcgcttcgaatatgtggtgcgtaaaaatgtcgctgcgctaaaatacaaggatatactgaaaattgtcgatggagcagtaaggcggagcgtcgaaggccgcttcgccgaatgcggcaataaggatagcgaatatcagaagagtttagcggagcggcccctcatacttccgggcgcgtttactcctatacgtactgtgcggattgccacaggcttaaagccgaaatccatggctgcagtgcgccgcgattcttcgggcaatcccataggttacgctaagaccgccagtaaccatcatatagccatctatgaggatagcgtaggcaggaaactctgctctgtgacctcgatgtgggatggtgtgttgcgacgtctcaatggcattcctgtgatagtgaagcatccggacgatgcctggaacttactgatggatattgccgacgaggatgtgcgcgagcggcttgccgcatctctgccacgcccggactggaagttccttatgagtctgcagatgaatcagatgtttgtgctcggcctttcggaggatgaattcaacgatgccgtcagaaacaatgaccgagcgactcttgccgcccatctctatagagtacagaaactcgctgacaatgatttcttcctgcgaagacatactaacaccactgccgatgatacgacggagtttaggaagatgttagatgtctatcgcttgtcgacgcaagcctttttaaacctcaatccacacaaggtgaaaattaccccgaccggcgattttgcttatgattaa

SEQ ID NO: 129 - DNA, 4653 bp, Unknown
  OMNI nuclease sequence
atgaaaaacattttgggattggatttaggctcgaatagtataggttgggctattgtaaaagcattgaaaaatgaagatggaaaggaaatcttacaaagcatagatcttgcaggaagtaggattattcctatggatcaagcaactttgggcaattttgaaaacggaaattctgtgtctcaaacaagagaaagaacaggttaccgaagtgctagaagattgagggaaaggtatttattgagaagagaaaggctgttaagagtgctgaattgtatgggatttttgccagaacattattctcaaaatattgataaatatggtaaattctttcttgataatgaggtaaaactttcatggaaaaaagataagatgggaaagaacgaatttatttttttagattcgtttaatgaaatgttggaagattttagacactcacaaccgcaattattgttagatggacgtaaagtgccttatgattggacaatttattatcttcgtaaaaaagctttgactgagaagatatccaaggaagagctggcatggatactcttaaattttaatcaaaagcgaggctattttcaacttcgtggagaagatgaagaagttcagggtaaaaaaatagaattttatgccttgaaagttgttcgagtggaagacacaggagagaaaaagggaaaggacacatggtataatgtgtatttagagagtggtttgggagatacggatgattattgggtatatcgtagggctagcagtgttcccattgatgagtgggaagggcaagttaaagagtttatcgtaacgacaactctcgataataacgggagtcctcagggtgataaagaaggaaaggtgaagcgttcttttagtatcccgaaaccagaagattggatgttagtcaaaaagaagacagaagtagatattaaatcatctggtaaaacagtggggacttatatttatgatacgttattacaaaagccagatcaaaaaattaaaggaaaattaattcgaaccatagaacgagaaaactatacaaacgagttatctctaattttggaaaatcaaaaaaaattccatcttgaattacaagatagggaattgtatcatcaatgtatagaattgctttattgtaaaaatgaggcacataaaagagttattggaacttgggattttacttcgttattcataaaagacatattgttttatcaacgaccattgaaaagcaaaaaggctttgattgataattgcccgtatgaagaatccttttatatagaaaatggggagaaaaaaagtaaaccaaggaaatgtattgcaaaatcccatcctctgttccaagaatttcggatatggcagtttatttccaatttaaggatttatcaaaaagtgaaagaggtggacggcaaattgcagtttaacgttgatgtaacaagtgattttttgagagatgaaagcgcttatggggaattgttcaaatggcttaatgaacgggcagaggtttcgcaagaagatttgttgaagcatttaggccttaaaaagacgaagacggaagatacggtgtctttatatcgatggaattatgtagaggataaaaaatatcccggtaataaaactcgtagttctattttgaaaaagttattgaacgatgaaaaagaagctctttcggaagatatagaattaaaaatatggcacttgctttattccgtttcagcacagtctgagatagataaagctcttagttcgaaaaatgtgtcaacaaaagggatttattctggattgagtgtatatttttccgatgagacgatacagaaaataaaaaatgtgaaactggaaagtgggtatggctcgtattcggcaaaggctattggcaagttgctgcctttaatgcgaagaggaaaatattggaatttagaatctattgataatcatacaaaggagcgtatcgaaaagattcttaatggagagtgtgacgagactatcagagcaagaacaagagaaaaatcaatttctcttaccgatatttctcaattcaaagggttaccactgtggctcgcttgttatatcgtttatgatcgccattcggaacttaaaacaattaaaaagtggaatggccctgaagatattgataaattcttgaaagagtttaaacaacacacgttacgtaatcctatagttgaacaagtgattatggaaacacttcgtgtagttcgggacatttggagacgagtaggttccatagacgaaattcatatcgaaatggggagggatatgaaacaaacagcccaagaacgggcaagacgcagtgctattatcagtaggaatgaaaatgacaatttacgcatcaaagcgttactccatgaatttatgaacccggaacttggaattgaaaatgttcgtccatattctcctgcacaacaagaaattttgcgtatctatgaagatggagtgttgagcagtgtttctgaaatagaagatgaaataaagaatatactgaaaaaattcaatgaaagtgaagagggaaagcgtccgaccaagaacgaaataattcgttataaatgttggttagagcaaaagtatcgttctccctatacaggcgaaataataccattaggaaaattgttcacaccagcctatcagatagaacatataattccgcaagctcgtttctttgatgattcatttaccaacaaggttatatgtgaggccgaagtcaatgccaagaaaggcgatttgttgggatatgagtttgttaaagaaaaaggtggcgaaattgtagaattaagcggaggacggaacgtgagaatcttttcggtagaagaatatgaagatttcgtaaaagagcattataaaagtaataagcagaaaatgcaacgtcttttggccgaggatattcctactgaatttagtcatcgacagttgaatgacagccggtatataagcaaatatattcggaatctgttatccaatattgtgcgtgaagatgatgaacaagaatctgtttctaagaatgtaatctcttgcaacggtgcgattaccgatagattgaaaaaagattggggtgtgaatgatgtatggaatcatattattttgcctcgctttgtgcggttagaggaaataagagcagataatggtgaaaaatttacagcctttaatcaggaaggacatcgaattccaagtatgccattgatacatcaaaaaggtttcaataaaaaacgtatagaccatagacatcatgctatggatgctattgtcatagcttgtaccactcgtgatcatgtgaatttattgaataacgaatgctcaaatcctcaaaataatgttaataggcatcaattgtcaagaaaattacgtagatatgagaatgtgtcgtacaaacaagatgggaaactaaaagaacgggaagtaccgaaagaatttctaaaaccgtgggaaggatttacaagagatgttgagttcgctttaaaaaatgtgatagtgagctttcgccagaatctgagagtgttgaataaaacagtcaattatttccaacattggaaagataattcctccgaaaaagaatggaaagaacaaaagtctgccgatcattggtcgataaggaagcctttacatcaagagactgttttgggagaggtttttttatggagaactagatttgtttcgttgagggaagcattgacaaaaccaaagagaattgtagaaaaagatttaaggtcaaaaatattagagttgcagcgtaaaggctatgatattgagcgaataaaaaaatatttcgaggataataaagatgtttggcaagatgtgaatctgtcgaaaatagaggtgcgttattattctcgtgagatagtagatcctcgaacaggattacctaaaaatcgttattttgcaactcgttttggaaacgatcttattagtttgtttagtggggtttccaattttgagaatgctaaaaaaataataaaaagcataaccgatacaggtattcaaaagattctgtttaggcatcttgaaaataaaggtaatgatccggtacttgcattctccccggaaggtatagatgaaatgaacagaacaataaagacattgaataatgggaaagatcataagcctatatataaggtgcgtatatacgagtgtagtacgatgaaattcccgttaggctcagtaggaaataagtccaagaaatttgttgaggcagcaaaaggcaccaatttgtattttgctgtttatgagaaagaagtggagaacgatcgtggagagtgccataaagagcgagcttttaagactattccgttgaatgatgttattcgtaatttgaaacaaggactaagcattgctcctaatgatgaaaatggaaatcctccggcatttatattgtctccgaatgatttggtctatttgccgacaaaagaggaattagaaactggttcaataagccaaccgttagatagaaataggatatataagatggtaagctgcactggaaatgtggctcattttatacctgcttttattgccatacctattcttcaaacaatagaacttggcagtaaaaataaggctcagaaagcatggactggtgagatgataaaagagagttgtatccccataaaggttgatagattgggaatattaatatccataaatgggagagcggtatga

SEQ ID NO: 130 - DNA, 4653 bp, Unknown; identical to SEQ ID NO: 129
  OMNI nuclease sequence

SEQ ID NO: 131 - DNA, 4284 bp, Unknown
  OMNI nuclease sequence
atgaaacgagtattaggacttgacttaggaacaaacagtattggctgggcggtagtgaatgaagccgagaaccatacagagcagtcatccatagttaaattgggtgtgagggtaaacccgcttactgttgatgaatcacaaaatttcgaaaaagggaaaagcatagaaaccaatacggcacgcacggcgaaacgtagtgctcgtcgtaatcttcagcgctacaaactacgccgcgacactttaatccagattctcaaaaagcacaatttcatttgcgatgatgccattttatcagaaaatggtaataaaacaacctttgaaacatatcgtttaagagctaaagcagtaacagaggcaataagccttcaagaatttgcgagagtgctgctgatgataaacaagaaacgaggatacaagagtagcagaaaggctaaaggtgatgaagagggaacacttattgacggcatggaagttgcaaaaatgctgtatgacaatgacatgactccaggcatgctgtgtcttcaattgatgagaaatggcaaaaagaaaatgccagacttctatcgttctgatttgcaatcagaatttgacagaatatggaatttccaaaagacattctatgagacatcactgacgcccgcagcaagagaagagataataggcaagaataagtctcaaacatgggcgatacttcaaaaacattttgtatgggagaagcaggctattagttggagtgaatctaacgctcagacagaaactgtcacagagaagtgccgactcgttggtcttaagcgtcagacaaaaggagttgaccttaaaatagagaactacgaatggagagtcagagcactgtctgaacgtattgaccctgaggaattagccattgtattacaagaaataaacggcgaaataaattcatcaagcggatatcttggagcgataagcgaccgcagcaaagaactgttcttcaaaaatctaacagtaggtcaagcccttctgcaaaaaatagaaaagaatccacataccagtcttaagaatatagtatattaccgtcaggactatcttgacgagtttgaaaccatatgggagaagcaggcagaataccatccagaactgacaaaagagttaaaacatgaaataagagacgccgtaatattctatcagcgtcgtcttaaaagtcagaagtcactcataagtatctgtgaatttgaaagagaagacagagaaagaaccgtaaacggcaagacaaaagcctttgtagcaggctgtcgtgttatacctcgttcttcattattatttcaagaattcaagatatggcagaccctcaacaatattgaagtattcattgcagacggcaagaaaaaacgccaccgttcgtcaacaccagaagcttcattatttgatgacatagcagatccattagatatcacaggacgccgccttctgacacttgaagaaatgcatacgcttgcggaagaactctctgtgcgggacaaaatgaagaaaaatgaaatcatcaaacttttgttcggcaatcgcactgacttagatttaaactataaagagattgatggcaaccgtacatggcatgaactatacaaggcattcagcgaaatattagagaattctggacacgaaccgataaacttcaagcacagtacatcttgtatcaaagaacaagtacgctcagtattcacagcattaggatggaacacagccatccttgatttcgattcttctgcaccacttgacacacaggtatcataccagctgtggcatctactctactcgttcgaaggcgacaatactaagactggcgatggcaagcttattagcaagctatgcgatatatgcaggtttgataaagagcatgcacgtatactatccaatgtctcatttatagaagactacggtagtctaagcgcaaaagccatccgcaagatactaccatatcttaaagagggcaatctctacgacaaggcatgcggacttgcaggctatcgtcattcagcctcatcacttacgaaagaagaaattataaacaaggagttaaagccattcctcgatatcctaccgaagaacagtctgcgcaacccagttgttgaaaagatactaaaccaaatggtcaatgtcgtcaacgaattgattaagacctatggtccgttcgatgaaataagggttgaacttgcacgcgaactcaagaagagccaaaaagaaagagaggaattgtcttctgctattaatagtgcgacaaaagaacttgagaaggtgcgtaatatactcaaaaccgaatttaatattcctcaccctacccgtaacgatgttatccgctaccgtctatacgaagaattgaaagataacgattacaggacactatactctaacacatacatcccacgagaaaaactattcacaaaagagtttgacatcgaacatatcattcctaaagcgcgtctttttgacgattctttctcaaacaagacaatagaagctcgcgatgtgaatatcaagaaaagcaataagacagcatacgatttcgtactaagcgaatacggagaagaaggtcttgccagatatcgccagcactgtgaatctctattcaaggacaagcgcaccaagctccgcaaattgctgatggaagaaaaagacattcctgctgatttcatcgaacgcgacttgcgtaacacacaatacattgcaaagcgtgcgttatcaatgcttaacgagatatgtcgcagagttgtagccaccacaggatctatcacagaccaactccgcaatgactggcaacttgttgatgtcatgaaggaattaaactgggaaaaatacaaagcgctcggacttgttgagtatcatacagaccatgacggcagacaaataggcagaataaaagactggacaaaacgtaatgaccatcgccaccatgcgatggacgcactcactgtggcattcacgaaggatgtattcatacagtatttcaacaacaagaatgccagcgacaaggcaaactcaaacgagtatgccatcaagaacacatatttcgagtcaggcagagccatcgctcctatgcctttaggagagttccgtgctgaagcaaaaaaacacatggagaacattctggtatctatcaaggctaagaacaaagtcgttaccaacaatgtaaacaagtctaagtctggcaaacgcggcggcaatagtaaaatacagttaaccccacgaggacagcttcataacgaaacaatatacggcagccacaaggaatatgtcacaaagacagaaaaggtgggagcttcattcaccgaagaaaagattatgacagtatgccgccagcaataccgcgaagcgctattgtggcgtctgaatgaatttaatggcgatccaaagaaagcattcacgggcaagaactctttagagaaaaaccctatatggctcaatgaacagaagactaaatttgttccgcctacagtaaagactgtcgaaatggctacggtatatactatccgtaaggctattagcgcagaccttaagattgacaaggtgacagatgtaggcatacgccatctgctgcaacaacgtcttgacgaatatggaggcgatgctaagaaagcttttgaaaaccttgacgagaatccaatatggcttaataaggaaaaaggtatccaaattaaacgcgtcaccataacgggcattagcaacgctcttgcacttcatgacaaacgtgacaaagacggcaacctgattcttgacaaaaacggcagacgcatacctatcgattttgttaacaccggcaataatcatcatgttgcaatctaccgcaagcctgtgcttgacaaacaaggtcaacaaaaatatgacgacgaaggcaatgccatgtttgaacttgcagagaatgtcgtttcattctatgaagctgtcgcacgtgtcaacgaaggtctgcctgtcatagacaagaactttaatagagaagaaggttgggaattcctattcacgatgaaacagaacgaatatttcgtgttccctaacgagaagacaggattcaatccgaaggagatagacctgatggaccctgccaattaccagatcattagtccaaacctgtttagggtgcaaaagttttctaacaaggattacacatttcgacatcatttggaaaccaatgttgaaacaaataagaacatgcaagacatagcatggaaacgtataacatcatttgccataatggacaaaatcatcaaagtccgcattaaccatattggtcagattgtaaaagtaggtgaatattaa

SEQ ID NO: 132 - DNA, 3780 bp, Unknown
  OMNI nuclease sequence
atgaaacaaatattaggtcttgacctcggagtcggatctgtcggctgggccgtcatccgtcagtctgacaatacccctgaagaaatatctatcgaaggtctcggatcacgagtcgtgcccctcaactccgatgagacaaccggatttaccaaaggcaacggcgaatcaaaatgccatgagcgcactttgaaacgctcaatgcgccgcaatctcgatcgctttcagcaacgccgcaagatgctcggccaactgctcgacgagctggggatgacgtttgacagcgacctgcttcgcctctcgccgttagagttgtggcaattgcgtgccgacgccgccgacggcaagccggtctctgcggcacaattgggccgtgtgatttaccatatcaatatgcgacgcggttacaagagctccaaggacgaggaaagcgccgagggcgccgacaagcgcaaacaatctgaatatcttgccaaaatcagcggtcgcgcacgcgaggcagccgaggcaaaccagacacccggccaatattttgccgtacggctcaaagagtcagcctataccaccccgtcaggcgctacctgctgttcctatcgcattaaggaacagacattcccgcgtcatgcctatattgaagaactgcgacgcatccttaatgcacagcgtcagcatcttcccgacatcctgaccgacgccaacattgcccgcattgttgacaccatcttctaccagcgcccgctgcgcagctgcaaacaccttgtaagcctctgcgagtttgaaagccacgagattaccgactccaaaggcaacaaactgattgtcgggccacgtgtcgcgcccgcctcttctccgcttgcccaggaatgccgcatctgggaagccgtcaacaatctgtcgctcatcaaccaccacaaccgcaagcgcaaagactcgccactcccatcgctctttgacatctcgtccgacgcccggaagttagcatacgagtatcctatcgacgacaatgaccgcagaatgattgtcggatttctcaacgagaatgagaaaatgaaggggtccgacctgctaaagctgctcaggctcaggaaagacgatggctttgccgtgccggctcaggtctccaggggtctgaaaggcaacgtcacccgcaacatgctccggaaagcactgggcgacacgcccggcgccgacgacctgctgcgttttgatattgaaattgtcgagaccgaccaatacgacgaagtgaccggcgccgccaagacgatggtctccgacagctatctgcgtgagccgctctaccagctgtggcacacctgctactcagtcagcgactttgacgagtttgacaaggccatccgcaagaaattcggcatcaccgacagcgaagtgatcaaccgccttttccacctcgattttcgcggcatgggatatgcctccaagtcagccaaaatgatgacccgcatcatcccgtggctgcagagcggatacaagtatagcgaggcatgcgaactggccggttataaacattcgtcctacgtcaccgccgacgagaacgccacccgtcctctccttcagcaactgcctccgatacagaacggcgacttgcgtcagcccgtggtcgagaaaattctcaatcagatggtcaacgtcgtcaacgccgccattgacaaatacggcccgatggatgaaatccacgtcgagatggcgcgtgaacttcgccgcggcaaggaccagcgcaaggccgactatgagcacaacagtcggcgcgagaaagacaatgaccgcatcatgaaagtcctcgttgagaaaggtttaaaaggctctcgcacacaaatccagaaataccgcatgctcgaagagtccgacttttgctgcatgtattgcggcaagcccatcaacgatatggagttcctccgcggcattgaggccgaccgcgagcatgtgattccacgctctctatttttcgacgacagcttctctaacaaagtctgcgcctgccggcagtgcaacgccgccaaaggtcagatgaccgcctacgacttcatggcggcacaaggcgatgacacacttacaacatttatcaatcgcgtcaacatgcttctcgaccgctataaaaagtccggcggacgcgagggcatctcaaagacaaagcacacccgcctgctgaccgctctgaaagacatacccaaggattttatcgaccgcgacctgcgcctgactcaatatatcacacgaaaagcgcttgacatgctccatgccgtgagccgcaacgtgatggccacttcaggctcggttaccgacttcttccgtcacgcatggggatatgacgaaatcctccactcgctcaatttcgcccggtatgaccttgccggacaaaccgaccagaccgaggtcatccacaaaggccagacacatcttgagacacgcattgccggctggaacaaacgtctcgaccaccgtcatcatgccattgacgccctgaccatcgccctgacccgacaagcctatgtccaccggctgaactcactcaacgcctccggcggcgatagcgccgacggtcagtccgactccgaccaactgacgggcaaccttaacaaatgggccacctcgcgtccccatccctccgtcgctgcggcatcggatgctgtggccgacatcgccatatcattcaaggccggcaaaaaggtcacggtccccggcaaacgatatacttataaaggtagcaagcgcactttggctcaggacggtctgctcgttccacgcggcgcgctgacaaaagagtccacctatggcgtccgtaagatgccgattggacttcagccgctgaaatacctttttaacaatccgtccgagattgacgacatccgcattcttcgggctgttgaggcccggcttgccgacaacgccaacgacgcctcaaaggccctcaaaagctgcaaacgccggcctctcacggtggaaggctccgacgtccccgtcacagaggccctgtgcttgaaacccaccgtcgtcatccgtgtaaagctgacatccgtcacgcctaagaactgcagcgacatcgtcgacggcgccgtccgtgaggctgtcgcaacccgctatgaagaagtcggcggaagcgccgacaagtttgtcaaaagccttgccgagcgtcccctctaccgcgacgccggcggccgactgcccatcacttctgtgcgcatccgcaagggtctgtctcccgagtctatcacaccggtacgatacgatagccacggcaatgctatcggctatgccgagtttggcaacaaccatcacatcgccctttacgaaaaaccggacggaactatcgaggagtgcgtcgtgccttttgccgaagccgtccgaagccgtcaggccaaccttcccgtcgtagtcaccgatccacaggccttgtggcaacagattgacatgctcgacaaagagctccccgagtcgtctctcagccgcttcccgtcccacgacagccgttttctcatgtccatgcaggtcaacgagatgtttatcctcggtctttccgacgaagagttcagcgacttggtccgtgacgagaatcggcacgaactgacttcccatctctatcgtgtgcaaaagctttcatccctatactacgatttcaagttgcatacatccaccctctccgactgcaccactgaccagatgaactgcggcaactacattcgcatcgtatcattctcggctctgaaaaaatataatcctataaaagttagagtcgacatcttaggcaacattattttgccgtcctaa

SEQ ID NO: 133 - DNA, 3747 bp, Unknown
  OMNI nuclease sequence
atgaagaatattttggggctggatttaggtaccacgagtataggctgggcattaattaaaacggatgacaaaaacaatcctcatgaaatactacgcatgggggttagacgcgtgcccttggcggaaaatgaagacaacaagtttgttaaagggcaatcaattactactaatgcagatagaaccacagcacgaggaatacgtaggaataatgacagatataagcttcgccgacaggctttatcaaaagaattgtcattgcttggaatggcaccgagtgatgctttaatgaaactccacctgttggaactatggcaacttcgtgcaaaggcagtaacagacgaggtgtccttgacagaattaggaagaatactgtatcttctcaacaagaaaagaggttacaagcattcttccattgatgaagacaaatcaaaacgtgatttcgtcaaaaaggtaaacggacgctatgcggaattgcatcagacgaatatgactattggccaatacgtcgcatggaaaatatcagaaactgccatcacaaaagaaggtaaaacctactacgtctacagggtaaaggatcgagtatttccccgtagggcttacgaggaagaatttgatgccatcatgcaatgccagcaaatgtatcatcctgatgtgctgaccaacgaggttattgaccgcataagaaacaacatcatattctatcagcgtgacctacgttcatgtaagcatcttgtttctgtatgtgattttgagaagcgacatttctacgataaggatggtaaactaaaacgtaacaagaaggatgaaatcatctacgacggaccgaaagtggcaccgcgcacgtcgcctctctttcagatgtacaaaatatggcaatcagccaacaacatacgctttcacaacagaaacaaggaatacctcgacattacaagagaacaaaggcgtgagatagccctttacatggacaataatgaaataataaagctcgaagatgtcaaacgtatattggagttgaatgatgactcaaggtggtattgtgacaatgcaataaagaatggtatcaaagggaatacgacgaaacatgcaatagtcacggccttatcatcgctttctcaagacaaaatagcagaaatcacacgctttaatcttgagatggagccaactgaaatggtagatgcagagactggtgaggttcttgttaggatcaagaaaacataccaacgtgaaccgctgtacagactttggcatatcgtatattcaataaagaaggatgaggaacgcaaaagtgccgtggcgaaattcctgcagtcattcggcatagacaacaaagaaatggtacaaagactttccgacatcgacttcaggacaccaggctacggaaacatctctgcaaaagccatctgtaaaatactgccctatatgacggagggtatagaatatagtgaggcttgcgaatacgttggaataaaccattcaaacagcctaagtaaggaagataacgagaaaagggaactgatgagcgaaatccctatcttgaagaaaaacagcctccgccagcctaccgtagagaagatactcaatcagactatcaatgttttcaatggcatcaatgccgaactacgaaaaaaaggtgaacgtattgacgaggttagagtggaattggctcgcgaacttaagcagagcaaggaggaacgccacaaaacgagcgaagagatgaaagctctggacgataagaacaatgagtataagaagatattagaaaaagaataccacttaaatgctactcgcaagaatcttctgaggtatcgcttgtggatagagtcaaatatgagttgcttctattgtgggcagcccataggattcactcctttcgctaatgagccagaggaggagcgtgaacacatattgcctaagagcctgcactacgatgacagctttgccaaccaagtatgctcctgccgtaaatgtaacagcgagaaaggagggcgcaccgcacttgactatatgcgtacaacttcccaccttcaagactacctcgacagggtcaaccaactgcatcaggcacacaagataagtggaaaaaaatatacccacctactgacatcctacgatgactatatggagcgaaagaagaacggcaaagagacaaaggaggacatacagatatgggagaacccgattgaccggcaactgcgtctgtcgcaatacatctcaaggaaggcaatggagattctttcttatgcttgccgtgatgtcgtcgccaccagtggcaccgtcactgccatcatcaggcacgcatggggttatgacactttattagaggaactgaacatgccaatctatcgcgacgccaatctgacagagttcgttgaaatcgagagtaaaggccaaaagctagagaaagaagtcgtcaagaactggacaaaacgtcttgacaatcgccaccatgccattgatgctctggtagtagcatgcacctcaagatcatttatacagaagattaacacactccacgcttcaaaacaggagatgcgaagcgaaatcgccagtgcaagaaagaaatgggatgagaacaacatccttattcagtggctgcatgaaaagaaccccttcaacaggcaagacgttctgcaacatgtttcctctatattcgtctcgatgaaagcgggaaagaaagttactgtgcctggcaaacggaaggaattcaagcatggtaaaccagagataaagcaggaaggactgagaatcccaaggggaccattgcatgaggagggcctgtatggctccatcatggtaaatggaaagagagaaatagtcatacgctacaaattgggcaaaggggcaataggttacctttttagaggaaaggaaaaatgtgaggtaaaaaagaataagactggcgaatacatactgaaagacggtattggtgacgtgctcgatagcattgttgacaagcacataaggtcattagtagaggtaagactcaaccgcaaatttcccaaaggtgagacctaccgttctaaagctgagaaagccaaaaaggaaggcaggaaatatgacggcgagaaaagatgcaagacagcattggaacaatttaagggactggacaaagacccaatatacttcgatgatgacaagactcgtgtcgtaaagtacgttcgctgcaagacgggacttaatgctgtccgacctttgagatacaacgacaataacgagcctatcacctacgctcttcctaaaaacaatcaccacgtggcaatctacagggataagcagggaaatgccgtggaaagcgtttgcactttttgggaggctgtggaacgtaataaccatcacattccctctatcatacgcaacccaggacaggtgtgggatgacattcaacgaagagaaaccaacggagaggaattgcctgctgtactgaagaagaatcttccaaagtctgactggaccttcgtggaaagcatgcagcaaaacgagatgtttgtactagacatggacagagaaactcttgagcagcatatcgcaacaggcaactacagcgcaataagtccgcatctctatcgagtgcaatctttgtctgacggagattatatgttccgtttacataccgatccgaagtcagaaagaacattggatgccaatactagcagacgattcattcggcttaaatttaagaagttcatcgagtccgaacaccataaggttgacatttctatcttgggtaaaatatccattgcaccatga

SEQ ID NO: 134 - DNA, 4224 bp, Unknown
  OMNI nuclease sequence
atgaagaagattttaggccttgatttaggaacaaacagtataggttgggcggtagtaagtgctgatgagaatggcaatcccacgcatatagaaggtatgggcagccgtattatccctatgggaagcgacaagattgattatgagaaaggcgctactataaccaagaatgcagataggaggactaagcgttctgctaggcgcatgggcaaacgctataagatgagacgcaataagttgctattcatactttccagattgaacatgttgcctgaacagattcaatttaagacagattttcctgaagcgacaaaaatccaaaacttggaactactgccaatatccaagaatactatgcaattggactctctacagcattatgaattgagagaaaaagctcttcacgggaagattgcattgcaagaacttggcaaaattttatatcaatacaataggctgagaggatattctggtggtggagacgacaacgattcaaagatagaaaagacagaggatgatgacaacaagaaatatgaagttagagttcaaaagttcattttaaaagatgttgcaaaatccgacagcacatatatagcaaagagtggaaaagacaaaggcaaagaacttcccatttacaatgtcattgtccttgacgaagacgaagaaattgaaggaacgactaaattgcaaactctgtcagaaaagattggcgaggaaatagaattagaaattagaataaagaaaataaagaaaggtgccagtatcgcattcgctttgccccagaaaacaaattggaggaagcaaatggaggaaacggagcattttttaaaggcaaagaattattatccctgtcaactatttgcagaagatttaagaaataataaatggacaaaaatcaggaacagagttatcctccgtgaacaatacaagcgagaatttgatgctgtatgggacgaacaagctaagcattatccgattcttgagaaatgtccaaatgatgttctcaacgaaatcgtcagttatatctttcctggcccaagcgactctcaaaagaaattaagagaacttggactaaggaatgggctgaagtatatcattaaagagcaaatcatatactaccagagaccactaaaatcacaatccaatcttattggtacatgtcaatttgagaaagaagaaaaagtaattcctgttacccatcccctatttcaggaatttagatgctgggatcagattaaccgtttatatatacgaagtaagcagcagatctggaatgagaagaaaggcaagtttgtcttgcagtatcaaaatcgatacttgacagatgagcagaaatattctatttacaaccggctacaagagcagaagcaattaggtttcaaagaagtagccaagattgtaaatttgggggatgacaaatctgaattcttgtatggactacacgtaaaggctaaactatccggttgcgacacaaaaatttcaattaagaaaattcttaaaggatattttgaacctgacacgactcttattgaaaagatatgggaagccgtttataataatgtacatgaaggaagtgaatacaatgaatccagcaaacgggttttatctatcatagacatattacctgagactctcggagatgaaagaagaacagaattggctctaaagattgcccaaaatatcaaattcatcaggaaatacgcaagtctctcaaaaaaagcaatcgaaaacattctccctattatgcgacctaatcctgatgtcattcctgaaaaggtcaagaagaattttgaggacattaaatggcttatcgatacaggagaggtcattgatgagtctatactacaagattacatcattgaattcgttaaagataatccacaggcactggaacatggcggtttaatgtacgcctttgcttcttctcttgtatatggaagacataccaaggaagatgtcaagcctcaacttaaagattatcacgatattaaatacgttgaaagaaatctaagaaatccaatagttgagcaaattgccaacgaaaccatgcaagtcgtgaaatcattatggaaacaattccacttaaatccagacgggctggaaataagagtggaattagcaagagatctaaagaacagcgcaaaagaaagagaaaatatattcaaagcgcaaaacaagaaccgtagtggtaatgagagaatcaaggaaagattaaagcaggaaaacgttcctgttacagacctgaacattctcaaatacaaattgtacgagcaacaatcgtatatctcaccttatacgaagaataccattgcatttagcaaattatttgacgataatttctataatatagaccacatcatacctaagtctcgctattttgatgactctatttccaataaagtaatctgtgaaagcaacattaatgaagaaaaagataatcgtacggcatgggagtatatctgtcaacaaagttctcaatacaccatactaacgccagaggcttatcttaatcatatcaacagctcgttctatggccaaaagaagaaaaaccttttggcagagaagattccatcaaaccccgttacaagacaaatgaaagacacacaatacatatccattgctgttaaagacgagttggcaaagattgttggaagtgagcacgttaagacaacgactggcggggttactgattatcttagaagtctgtggggattaagaaaactatttatggaactgactgaggctcgtttcaaacagatggaactatggaacataaacgaagacggaacgcccaaagaatcatgggtaaagaaaggctatgacaaaataacccacaagaatgtatacgagataaaaggttggagcaaaagatatgaccacaggcaccattctattgatgctcttgtcgttgcattgtgtaatgagaaatttatcaaacgactcaacgatctcaataaatacttccaagaagaattagccaaacacaagagttccatcccaatcctagatgaagactctttagaaatagccttctttaacctcccgaaggagaaacgtaataaaattatgcaagagatagaaagctctcgcaaatttgatgcaccttttgataatctagttgcagaagcaaaatgccaacttgaatcaatgattgtttcacagaagtccaaagacaaattgtcaataaaagaagactttaatggcaagaagcaattgaagatccgagcagccttacatcaagaaacatattatggaaaaacaaatggtcgtgatactaaaaccatcgctatttccatgttaaaagcaaaagacattcctcaaattgttgatgaagtcctgaaaaaagaaatagatgcacatcgcaagaaatatgaatcaatgaaagaagcattcactggagaaggtcttatcgcatttaatgagtccagattccaaacaaagaacaaatcagctcttaagccccctgtatacaaagttagattatggtatagcaacaaagaaaaagaaaccggcaacctccaaccattatatggaaaagcagcaaagaaaacggttgttacgggagacaattatatgtttattgtaatggaaaagagtggaaatagagtctttgatatcgcatcattatttgactctgtagcattggctaaagagtatgtaaaacaaggaatcgttgacattgattatattaaaaagaaaatatgtgatgacctccgttataatagtagcgacagcaaggggaacaaggcagacaaggtcatattctatttacaacagaacgatttggtatacatgccaaaagaggacgatgagatattaagattcaatgaattggagttcaagaactggctatcaaataccaaaaacaagattgactttgctaaaagagtatacaaggtcgtaaaatttactggaaaagactgtttctttattcctaataatgttgcaaaggaaataatcatacctaaggatatgtctaaagaagaactcgatgagctgaaatccaaatacaaagacaaagctatccccaagcaagaacagaattatatagaatatggtacctattctaattgtaccccattagaaatgaataaactattcacgatgtcaatgcgagaaggtaaaaaatataaaggggatagaccaaggaaaatacaggactactgtatcaaaataaaaacggactggcttggcaacgttattgaatttaatgatatgaaattataa

SEQ ID NO: 135 - DNA, 4542 bp, Unknown
  OMNI nuclease sequence
atgaagaagattcttggtttggatttaggtacaaatagtataggatgggcagttgttgaaagagataacgataatggccgtatcattaaatctggtagcagaattatccctatggatgctgctactcttggcgatttcgctagtggcaataccaagtcgcaaactgcagaacgaacctcaaaacgttctgctaggagaatgagagagcgctttctccttcgtagagaaagactgcatcggcttttacacattctaggctttctgcctaaacattatgaagagaaaatcggttgggatttggataatgacagaaagcattatggctcttttatcgaaaatgaagaacccaaagttgcatggattagaaacgaggaaaagaaatatgaattcatgtttcaatcttcattccatgaaatgcttgaagatttcaagaaatatcacccggacattctttctgacggcaaaaagattccatacgactggacactgtattacctgcgcctaaaggcgttgagtcagccaatcagcaaggaagaacttgcttggattattcttaatttcaatcagaagcgaggctacaaccaacaacgggatgaagtacttgaagcttctgacgataaaaaagaggaatacaagtgtctgactgtactcagcgtgactccagatgaagatgctaagggcaaagatatttggtacaatatccgttttgagaatagcgacatcgtttatcgaagaaaaagtaagtatccattgaattgggtcggaaagaagcgcaacattatcgttaccaccaaacttgatgaagatggtaatccgaaattaaagaaagacggcagcattgattacagtgttaaatcgccaaatgatgatgactggactttgcagaagattaagacagaacaagaccttaaagattctcatcaaactgtcggccagtttatatatgctgcattgttggcaaacccatcagaaaaaataagaggtggaatagtcagaaccattgaacgtgacttctacaaagaagaactggaaacgattttgaagaaacaaagtcaattccacgctgagctaaaagatcgcagtctatatgaaaaatgtataaatgaactttatcgcaataacgagtctcatcgtaataatattgccaagaatgatttcgtcttcttaatattagaggatgtcttattctatcagcgcccactgaaaagcaagaaatcacttattgatgactgtccttatgaaagccatcagggtattgacaaagaaacaggagaaatctgtacttaccccttaaagtgtattgctaaatcaaatccatattttcaggaataccgcgtttggaaatttatgtccgatctgcgcattattgctaatacaaaggagattaatgggcacattcatactgacgtcgatgtcacaagtgagttcataccagataatgaaagctggagtaatatgtttatttggctaaatgacaaaggacacattactcaaagcgacatgttggcttatttgggaattaagaagaaggaacaaagcaagtacagatggaattttgtagcagacaagcattatcccatgaatgcgacacgacatgccatcttgaacagaatgaaagatgatgaacttttgagcagagaactggaacaagccatttggcacctactttattctacaacatcaaaagcagagattgataaatcgctttcgccatctgatacccctagttgtatatacacaaaacttatcgaagctggtttttctgaggaatctattgagaaaataaagactataaaactaccagacgaaggttatggcgcctattcagaaaaggcaatcaagaaattgttgccactgatgcgctgtggtaagctatgggatgaaaaaggcattcatccctctaccttacaacggattgatgctttctcgaaaggagaaggtatggatgatttttcagagaatgtgaatcagcggttgtcctctatgagcggaatcgattctttccaaagattgcctgaatggttagcttgctatgtagtttatggaaaacatagtgaagccaatgatatagtgaaatggaaatcgcctgatgatatcaatatctatctcaacaacttcaaacagcactcacttcgtaatcctatagtcgagagtgtgattttggaaaccttacgagttgtaagagatttgtggaaacgatatggaaacattgacgaaatccacattgagatggggcgtgaattaaagaatccaagtgacaaaagagcacaaattactaagcgtgttctcgaaaatgagaacactaatgtaagaattaaagctctacttgcagaattcttggctgaagagtacaaaatagagaatgtaaaacctcattcacccagtcagcaagatctgcttcgcatctatgaagaagatgttttggcgcataacgagcctgatgatgagctaaaagacatcattaatagtttgtcgaatcccaccaaacagccaacgcgcactcaagtgcttagatacaaatgttggctcgaccagaaatattgctcaccttatactgggcagccaatacctctatcacgcctgtttacttctgattatgagattgagcatatcattcctcaatcaagatattttgatgactctttctcaaacaaggttatttgtgaatcggaagttaacaagctgaaagacaatcagctgggctatgagtttatcaaacagcatcatggtcaaacagttcaattggcttcagggaaaatggtcagagttctggaagtcgaacattatgaacaattggtaaaagataatttcgctcaaaccaagagaaggaagctgttaatggatgacattccagcagaattcatccaacgccaactcaatgatagtcgttatataagtaaggtcataaaaggcctgctatcaaatattgtaaggactactgatgaggatggcaatctcgaacgggaagcaatttcaaagaacgtcattacctgtaacggttctgttaccacaagactaaagcgcgattggggacttggcgaggtttggaatttcataatccttccacgcttccaacgcctcaacgaattgactggccgaaattgcttcaccactttcaacactcatggaaatgagattcctgctatgcctcttgaattacagaaaggttttagctttaagcgtatagaccatcgccatcatgcattggacgctatcgttatagcatgtacgacaagagagcatgttaatctgctaaacaacgaatctgcacttcctgagcatcaggaaatgaaacatgcactttctcataaactacgcagatgtgaagaaatcgttatcaatggaaagaagcgcaggatattcaaagaattcatcatgccttgggcatcattcaagaatgacacccttttatcactccagcaaattgtggtaagtttcaagcagaatcttcgtgttctgaatcaggccacgaacctatatacaaagtatgtgaatggacagaagacgctatctgcccaacatagttcagaccactttgctattcgtaaatcattacacaaggacactgtgtttggacatgttaaccttcaacgtaagaccacaatcaagttaaaggatgcactgaaggatgtcaatcgcattgtagacaaacgtctcaagcgaaagattaaagagctgcgggcaaagcactacaatgacaaacaactgcttgtctacttcaaagactatgcctacgaatggaaaggatatgatttcaacaaagtagaggtattctattttactgacgaaaaagaaccaatggttgctactcgattctgcaacgacctcgttagcatatttagtggtaagacaaaaaaacaagatgtggaaaaagtcattgcccaaattacagatacgggcatccagaagattctcaccaattatctgaacgagaaccttgataagatagagtatgcattttccgcggaaggattggagctgatgaacgagaatattgctaaatataataatggcaagcagcataagcctatctataaagtaaggctaactgagactttgggacaaaaattccaaataggaataactggtaacaaagctgcaaaatatgtagaagctgcaaaaggaacgaacctttatttcgcagtttatcagaacgaggaaggttcccgttcattctctactatacccttgaacattgttattgaacgtatgaaacagcatttatcacctgttccagaatgcaatgataaaggagaattccttcaattctatttgtcacctggtgaccttgtatatattccaacaatagatgaagaaataaataacataggtaacgagaacgaccctcatagaatttacaaattggttagttgtacatctaacgaagcacatatggtacccgcttatatagcatcacctataattcctacaacagagttgggttctaacaataaatctcaaagggcatggactggagaaatgataaaagaaatatgtataccaatatccattaatcgtataggtgaaataaaaatcaaatga

SEQ ID NO: 136 - DNA, 4587 bp, Unknown
  OMNI nuclease sequence
atgattaaaaaacagatattgggcttggatcttggtacaaatagtatcggctgggctgtggtaaacaaaacacaagaaagcgatggagtatatcatttagatagtatcattgatgcgggaagtaggataattcccatggatgcagctatgcagagcgattttgcaagaggaaacaccatatcacaaacagctgacagaacacactttcgcggagtaagacgacttcgtgagagatgtcttttgcgtcgtgagcgattacatagagtattatatcttatgggattcctaccaaaacattattcggacagtttaactcgctatggtaaattcaaagattgcacagaatgtaagttgccttggacaacagatgaggaaggacactttacatttctatttaagaaatcatatgatgagatgttacaaatattttggcaagttcatcctgaacttatgaagcaaggaatgaaagtgccatacgattggacgatatactatctcagaaagaaagcacttgtggaagctatttcaggagcggaacttgcatggatattacttaacttcaatcaaaaacgcggctattatcaaacacgtggcgaggaacaagaggaaaataagacggaaaagaaggaatactatgcccttaaagttgtagatgtggtggataccaatgaaaaaagaggtaaggatacgtggtttgacatctatctcgagaacaatatgatataccgtcgtacagctaaggaagctccagactggataggaaaggtcaaagagtttattgtcactactcaactgaatgaggatggcacaccaaaacttgataaggaaggaaaaataagacgttcatttagaatgccgtccgaaaatgactggggacttgtaaaaatcaagactcaggcagacatcattgattcacatttgacagttggtgcgtatatcttcaatgcattacttgcaaatcctaagcaaaagatcaagggaaaattggtgcgaacaatagaacgggatttctacaaagacgaattgaaagctatactcgatagtcaaaaacggtttatcccacagttacaagacaacgaactgtacaaggagtgcatcaaagaattgtatcaacaaaatgacgcatatcggaattctatctctggacatgatttcacatatttatttgtggataatattatcttctatcaacggccattaaagagcaagaagtcgttgatagacgaatgcccgtatgaaagtcatctctacatagataaagagggaaagcaggttgagaagcatgttaaatgtattgcgaaatcccatcctctctttcaggaattcaggctttggcagtttgttgctaacatcaggatttttgaacatcggaaagacgaaaatggtagattgctcaatgatgaggatgtcacatctcaattcctgcctgacgagaactcacgtgttgtactttttgaatatctgaatgacttgtcaagcattactcagaaaactctatttgagaaatatttcggaatcaaaaaaacaaaagggaagaatgcagagattccctacagatggaactatgttgaagacaaacaatacccatgtaatgagacacgaggtgaaatattgtcaaggttagcgaaatcggagatagattccagtttcctcaataatgaagcagaggagtctctatggcatattctttacagtgtgaacgacaggaacgaacttcacaaagcacttgtaaagtttgcccaatgtcattccatagacagttcatttgcagacgtaatggtcaaattccctccgtttggctctgactatggagcttactcggctaaagctattaagaaacttttatccgtcatgcgtatggggaaatattggaatcaggcaaatattgacgcatctacacttgccagaataaacaaaattgtagacggtgaagtagatgaatccatcagcaaaagggtaagagaaaagacaatatcattaaatgatataaatagtttccgtggattgccactatggttggcttgttatgtagtgtacaacagacatagcgagactcaagataccgaccgttgggaaaagccagaggatatagatgcttatctcaagacttttaaacaacattcgcttaggaatcctgttgttgagcaggtcgtgacggaaaccttgcgtgtagtaggtgatatttggaaaacgcatggacatattgacgagatacacgttgagatggggcgtgaaatgaagaatcctgctgacaaacgcaagaaaatgaccgagcgggcagtagaaaatgaaaatgcaaatttacgtgtcaaagccttattgacagaatttctcaatcctgaatttgagatagaaaatgtacgtccatattctccaagtcaacaagaattattgcgtatatatgaagatacagcacttaacagtgtagatgacctcgaggacgatataagcgacattattcggaaatttgcacaaagcgaagtgagcaaacgtccttcgcactctgaagtattgaggtacaagttatggttggatcagcattatgtgtcaccttatactggacagacgataccgcttgcacgtttattcactcccgactatgaaatagagcatgtaataccacaatcaagatacttcgatgactctttatctaataaagttatatgtgagtcagccgttaataaactgaaggacaactgccttggatatgagtttattcaaaagcaccatggagagattgttgaccttggtggtggacggatagtaaaaatcttagaaatggatagttactgtgcgaatattgaaaaaatatacaaaaacaatcgcactaagatgaagaaactgctaatggacgatattccagcagaattcatagagcggcaattgaatgatagccgatatatcagcaaacttataaaaggtttgctgtcaaagatcgtgagagaagatgatgaacaagaagctacatccaagaatgttgtcgtttgtacaggcagcgtcactgaccgtttgaagagggaatggggcataaatgatgtgtggaaccacatcatcctgccacgtttcgaacgcatgaatgaactgacgggaacaaataagttcacatcaatcagttcatctggacatctaattcctgacatgccattggaattacagaaaggtttcagcaaaaagcgtattgaccatcgtcatcatgcaatggatgcgattgtgattgcatgtactacgcgcgaccatgtaaatcttctgagtaatgaagcagcatcacctaaaagcaaccaaaaccgctaccagctatcacgtaaattacgtaggtacgaagaagtaaccataaagcgtgatggagaaataaaaacaatctctgtagcgaaggagttcaaaatgccttggccttcctttgcttcagatgtagaaaaggcactaaataatatcattgtgagctttaagcaaaatctacgtgttattgtcaaaacaagtaatcattctatgcgttttgtagatggcaagaaaagaatgctaaagcagacaaagggcgacagttgggcaataaggaagtctatgcataaagagacagtgtttggcgaagtaaacctgagacgtgtgaagacatttccattgaaagaagcaatgaaaaggcctgagcgtattcttgattctgaattaaaggatagaataaaggcaatggtaaaacttggctactcagaaaaacaagtaaaagcatattttgtagaaaacaaggatatgtggagcgacatcgacataaagaagatacagatgtattatttcacgaaagaaacatctgatagattctttgcgacaaggaagaatattgatacttcatttgatgaaaataaaattacaaataaaattacagataccggtattcagaaaatcatgcagcgccatcttgctaactatggcggtgatgccgatcttgctttctctcctgacggcattgacgagatgaatcgcaacattaaagagttaaatggaggaacagaccatcagcctatatataaggtaagagtgtatgaaaaggctaataagtttgctgttggacaaaagtacaacaaacaaagtaagtttgttgaagctgatgacggtaccaatcttttctttgctatatgtgaaaatgaagtgcagaacaagcaaactggtgagattaagaagaaacgttcattccgaaccatacctcttaatgaggcaatctcaaagatgaaattagggcagcctctcgatgaaaatgcattatttattctttctccaaatgatttggtctatttgccgacggaagaagaggttggttgtgaaaaaattggaaatattgattattcaagattgtataagtttgtaagtgccgcaggttttcgggcagattttgtacctgtaaattccgcaaatacaatttatgatgtaaaaaaagattatgcagaattgttttgtaatgatgcagttgttcaaaatgaatttggagtaggtagtccgaaatcaaaaaatgaacgggctataactggtgaaatgatcaaagagacgtgtattcccataaaggttgaccgtcttggacatatattaaaaataggagtatag

SEQ ID NO: 137 - DNA, 4632 bp, Unknown
  OMNI nuclease sequence
atgagtaataagaatattcttgggctcgatttaggtactaatagtattggttgggccgtagtgaaatgtatagacaacgaggatactgaacgtaaacttataggacttgttgatgcaggaagtcgcattattccgatggatgccgcgatgcaaagtgattttgcaaaaggtaatacagtgtcgcagacaaaggaacgaacgcaatataggagtgtgcgtcgtatacgtgagcgtcatttattgcgccgagagcgattgcatagagtcctttctcttatgggaatgttgccgcggcattatgcacaggcgctgactcgctatggtaagttcaaggacgatgtagagtgtcgtttaccatgggctgagggtagtgaaggaatgcctgtgtttatctttcagcagtcttatgatgagatgctacagatcttttggcaggaacatccagagctgatggctaagggaatgaaagtgccctatgattggaccttatattatctccgtcataaggcattgcatcaggctataagtggagaggaactttcgtggatactcctcaattttaatcagaagcgtggctattatcaagcacgtggtgaggaggatgatgttgacacttcaaaagaagagaagtattatgctcttaaggttgtcgatgtggtaaatagtggtgataagagagggaaggatacgtggtacaatgtatttcttgaaaatggcttggtttatcgtcgttcggcaaaagaaaagcccgactgggtgggcaaggtgaaggatttcatagtcaccactcaactgaatgaagatggtactccaaagagaggaaaagatggtgaagtaaaaaggtctatcagtatgcctaaagaggagaattggggacttctgaagattaagacagaagatgatattcgcagttcgggccagtctgtaggtgaatatatttttggtgcattgcttcggaatccgaagcagaagattaaaggccagttggtgcgcaccatagagcgcactttctataaggaagagctgcgaggcatattggagaagcagcgcgagtatattcctcagttgcgtgatgccgcattgtatgaagcgtgcattaatgagctttatccgcagaatgatgcttataggcagtctatagcgtcaaaaggctttacatatcttctattggataatatcatattctatcagcgtccgctcaagagtaagaagtctatgatagacgaatgtccatatgaatatcacgagtgtcttgatgtcaatggcgagaaaatgaagaaatacgtaaagtgtattgccaagtctcatcctctctatcaggagtttcgtctgtggcagtttgtgagcaaccttcgcatctaccaatgtagtatcgacgacgaagatgtgacttctcaatttcttccagacgaggaaagtcgtgcttgcttgtttgattggctcaacgatcgtgattccataaaagaagaaatactattaactaaatattttggtttgaagaagccaaagggaaagaacgttgtacttccgtatcgttggaattatgtgcgcgataagtcttatccatgcaacgaaacgcggggcaagattctggagcgtttgtcaaaaaatggggtagatacatccttcttagatgttgagaataaaaatgaaaagaatgtggaggaaggtctatggcacatactctatagtgtgaacgatcccgagcaacttcgtagagccttgcgaacgtttgctcagaagtgtgttgcgaagcggtgtattttgaaccaatcagctaatgacgaagcgatgcccgatggggatgcagcatggattaatgcatttgtcgacgcaatggtgaaattccctcctttcgagaatgactatggtgcttattcggcgaaggccgttaagaagttgctttctctcatgcgtatgggacatcattggagagcagacgacattgacgaaaagacgcggtcgcgcatacaaaagttgatagatggagagttcgatgaaagcatacgagagagagtgagagagaaggctatctctttagaccgtttggagaagtttcgcggattgcctctatggttggcttgttacgtggtatacaatcgtcatagtgaagcgagcgatttgagccgatggcaaacgcccgacgatattgatgcttatttgaagagtttcaagcagcattcgctccgaaatcctgtggtggaacaggtcgtcaccgaaacgttgcgcacggtaagggacatatggagaaagtatggaagcatagatgaaattcatgtggaattaggtcgtgagctaaaagctccagcagatcaacgtgcacaaatgacggaacgagctttgcaaggagaaaataccaatctgcgtatcaaggctttgcttacggagtttctcaatccagagttgggtatagaaaatgtgcgccctttttctccgagccagcaagagttgctccgcatctacgaagacacggcgctcaacagcgtcagcgagcccgacgactatgtcaccgagataatcacaaagtttgctgatgctaagaagcgtcccacgttttcagaagtaaagcgttatgccctttggcttgagcagcattacgtgtcgccttatacgggcgagaccattcccttagctcgtcttttcaccaccgactatgagatagagcacgtcataccgcagtcgcgctatttcgatgattctctgtccaacaaggtcatctgtgaggcggaagtcaataagctaaaaggtaatgctctcggcttcgaatttattaagcagcatcatggcgagaaagtcattctcaatggcggtcgcgtagtgaccatcctcgagaccgatagttactcagaccttgtaaataatgtctatggtaagagcaatcgtgcaaagatgcgcaaactatttcttgaggatatccccgcggagtttattgagcgtcagatgaacgatagccgttatatctgcaagatggtcacatccttgctttcgcacatagtgcgtgaagaggaagaagaagaggctaagtcgaaacacatcgtggtatgcactggtgccgtaaccgatcgcttgaaacgcgattggggagtcaacgacgtatggaatcgcattatcttgccacgctttgagcgtatgaataagattactaatacgcagaagttcaccaccatcagtacttcgggacatcttattcccgctatgccgttggaactgcagaggggcttcagcaagaagcgcatagaccatcgtcatcatgccatggacgccatcgtgatagcttgtgccacgcgtgatcacgtcaaccttttgagcaacgaagctgctctgcccaagaatcaagccaatcgttatcagctctctcgcaagcttcgtcggtatgaagatgtgctcgtctgccgtgagggtcgctctcgcaagatctctgtagctaaggagttccttcttccctggcctacttttacaaccgatgtagagcatgcgttgagacagattcttgtcagtttcaagcaatatttgcgtgttatcacaaaagctacgaaccatactcttcgtatcgtcaatggcaagaaaatctctgtgccgcagacgctgggcgatagttgggccattcgaaagtccatgcataaggagactgtctttggagagatcaatctgaggcggacgaagactttcggcttaaagcaagcattgcagcttcctcgtcgcatcgtcaatcgcgatttaagaggaaaaatcatgcaactcctcgaactgaaatataccgagaagcagatcaaagcctatttctcagagaatgccgaagcgtggagtgatgtgaatctgaagcagatcgaaatgtattatttcaccaaggaaacctccgaccgcttctttgccacgcgtaagagcattgacacctcgtttaatcgcaaggcgataaacgagaaggtggcagatacggctatacagaagatcatgcttcgccatctcgagcagtacgccgacgatgccacgctcgcattctcgcctgacggcattgaccagatgaatagtaatatccttgcgctcaatgacggcaaataccatcagcccatctataaagtgcgggtctatgagaaagccgaaaaatttgctgtagggcagaaaggcagtaagagtcggaagtttgtcgaggctgcaaagggtaccaacctcttctttgcgatatatgagcagacggctgtcgatcctgctacgggattgtccgtcaagaagcgcagttatcgcaccatcccactcaatgaggccattctcaagatgaaacagggggttccacttgatagtaaggcctcctttatcctctcgcctggagatctcgtctacgttcctacgaaggaggaaaggcggacgggacagatggaaagtccgatagataatgagagggtgtataagatggtaagttcaggtaaagggcaagttgattttgttccatattctgcggcttccgtcatattctcagtatcaaaagaaaattcttcccattactcgggcatacaaaatgaatttggtgtgggcagccctaagtctaaaaatgagcgagctctcactggcgagatgattaaggaagtctgccttcccataaaggtcgatcggcttggccatctcatcgaaaaataa

SEQ ID NO: 138 - DNA, 4725 bp, Unknown
  OMNI nuclease sequence
atgaaaaagattcttggcctggatttaggcacaaacagtataggatgggcagttgttaacgctgatgaagccacgcgtaaagacaacacgaaatatctgaaaccgaacagtatcagttgtgcgggaagcaggattattcccatatctgcagatatcttgggagatttcgacaaaggcaattctatctcacagactgctgaaaggactcggctaagaatgatgcgccgtttacttgaacgcaaccatttgcgccgtgaacgactattaagagtgcttaaggtcatggattttcttccagaacactataattcgaagatcagtcgatatggcaagtttatagacgacagtgaacccaaactaccttggcgcaagagtaaagacggaaaaatggaattcctattccaagaatcttttgatgagatgttggccgaattcaaacaacatcacccacaactattggcaaatggaaagaaagtaccatacgactggactatctattatcttcgcaagaaggctttaacacaaagaattacaaaagaggaacttgcctggatactattgcagttcaaccaaaagcgaggctattatcaactccgtggtgaggaggaagaagaaaaagccaatgagaccattgaaatcatcagtgcaaagattctgtccgttgaaaagaaagagaaagacaagaaatatgaaaagtattggtacgagatgcatcttgagaatgggatgacctatcgtgccactttctataatgacgtcacaagttgggaaggcgagacaaaagacttcgttctgaaaaggacaacactcaaggacggcacgccaaaaaatgaactttcttttttgccaacccctgaagagattgacctaatggatgcccagcgcaaggcaaaaatgtatgccaaaatcaaactccgcactgaaaaggagattgagaatagccataagaccgtcggaagttatatctatgacagcctattgcaaaatcctaaccagaaaattattggcaaactggtccgcaccgtagaaaggaaattctacaaggatgaactgaagaaaatcttggaagtacagcaggagttgattcctgaactgaaagacgaagccctctatcaaagatgcatagaagaattgtatgcagcaaacgaagcgcacagaaggtctttgtctaaacccgattatgtcaatctgtttttgaatgacatactattctatcaacgcccgctgaaaagcaagaaatcactcattgacgattgtccctacgaatatcatgtgagcaaggacggcgagcaacatcctattaaatgtatcgcgaagtcaaacccatactttcaagagttcaggctatggcaattcgtacaaaacctgcggatttatcaacgtgaaaggactgttacagatggccaattagacctatttacaaacaccacgactaacaaacttcaaactgacgttgatgtcacctctgagattctgaaaacggaggaagactacgtcaaactgttcaactggctcaacgacagaagttccatcaaacaagacaccctacttagttcctatttcaaggccaagaaagaaaagggtaaggacaaatacccctatcgctggaactatgtagaagacaaagattacccttgcaatgaaacgagagccacgatcctctccggactggcgaaatgtaatatcagtgccgacttcctcactcacgagaatgagatgtctttatggcatattctttattccatagaagataaagcagaactatataaagcactgaagaagtttgcccatagacatcaacttgaagagaatttcccagaagtgttgagcaagacgaagccattcaagaaagactatggttcgtattcagaaaaagccattaagaaactgctcccactcatgcgtatgggcaactactggaatgaagagcaaattgatgccaaaactcgcgaacgcattgaaaaaatcatcgacggagagtacgacgagaacatcaagaaccgtgtcagggagaaggctatcagcctaacagacattcaacatttcagaggactgcctgtatggttggcctgctatatagtctatgaccgtcattcagaagccaaggtagttgagaaatgggaaaagccggaagatatagattattatcttaagaacttcaagcaacactcgctgcgaaatccaattgtagaacaagttatcacagagacattgcgcaccgtcagagacatctggaagcaggagggtcagattgatgaaattcatgtggaactgggccgcgaaatgaagaatcctgcagacaagcgcagacagatgactgagcgtattcaacaaaacgaaaacaccaacctgcgcatcaaagcgatgctgatggaatttatgaatcccgatatgggtattgagaatgttcgtccgcactcgcccagccaacaagacattctacgcatctatgaggagaatgcacttgacaatctcagcaaagaagacaaagactacgacttcgtatcgaagatttcaaaggtggctcagccttccaagtcggacatcatcagatacaaatgttggctggagcagaaataccagtctccatatacaggaaagatgatacctctctctaaactgttcacccctgcttacgagatagagcatgtaatacctcaatctcgctacttcgatgattcgttcagcaacaaggtcatctgtgaagcagaggtcaacaaactgaaagaccgccaacttggctttgagttcatcaagaaccatgctggcgagattgtccaactgagccaaggcgggactgtgacgattatgtctgtagaagcctatgagaggttcgtgaaggattattatagcaacaatcggacaaagatgaagaaactactgatggacgacattcccgatggtttcattgaacggcagatgaacgacagccgatacatcagtaaggtggtgaaaggactgctttcaaatatcgttcgtgagaaacaagaagacggtgagtaccagtcgtccagggagtatgaacaagaagcggtttcaaaaaatgtcatatcctgtacaggctctatcactgaccgtctgaagaaagattggggaatgaacgacgtgtggaataacatcgtccttccacgcttcaaacgtttgaacgaagtgactggaaaggattgctttactacatacagccgcgaggggcatgagatcccgaacatgcctttggaactacaaaaaggattcaacaagaagcgtattgaccaccgccaccatgctatggatgccatcgtaatagcatgtgcgactcgcgaccatgtaaacctactgaataacgaggctgcacattctaaacataacgtcaaccgctatcaattacagcataagttaaggcgatttgcaacaatcaaaattaacgggaaagagcgtgagattgctcaagagtttttgaaaccgtgggagtccttcactaccgacgcatggcaggtgctaagcaatatcatcgtcagtttcaagcagaacttgcgtatcatcaataaaacgaccaatcgttatcagcactgtgaagatggaggaaagaagggatttgaaaagcagcacaaaggcgaaagttgggcagtgcgcaagtctatgcacaaagatactgtctttggtgaagtaaaccttcgcctcaaaaagacagtttcgctgaatgaggccatcaagaaacctgagaatattgtcaacaaggagttcaagaagaaggtcattgaactactcgaccatggacgagacgcaaagttcatcaaaaagtatattgatgacaacaaagatgtttggtcagacatcaatcctgctaagattgaaattttctatttcagtaaagatgagaaaaaaagaaatggcgaaccaaaagagcgttattttgccacccgcaagtcactggacacaacctttgatgagaagaagataaaagagagtgttactgacacaggcatacagaagattctgttagcacacttaacaaccaaggaaaataatccagagcaagcattctcacctgacgggattgaagagatgaatcgcaacatcaccgctttaaacaacggcaagttccaccagcctattcttaaagtacgagtttacgagaaagcagataagttcgctgttggacaaactgggaataaaacaaagaagttcgttgaagcagcaaaaggcacaaatctattcttcgcattctttggaacagaaaaggaaattaaatctaatgggagaaaggaaatcgttcgctcatttatgaccattcctcttaatgtcatgatagactgtcaaaagaaatatgggatacagtggcgtaacaacatcgaagattatctaagaggaaaagacatgattgatgcagatgcgaaactgttattcattctttcaccaaacgatttggtatatctgccaagggagaacgatagaaaagaagatataatgcctcttgacaaacagcggatttataagtttattgaccctgctcaagataaaggcaattttgttcaatattctgttgcaaaagcaattttctcagccaaattcacagatcaaaagaaacaaggaatctcctatcctattcaggatgagtttggacttggtagccaacaaacaaaaagcccacgagcgattactggcgaaatgatcaaggagacctgcatccccataaaagttgacaggttaggcaatgtgatagaaataaacggctcaccattataa

SEQ ID NO: 139 - DNA, 4551 bp, Unknown
  OMNI nuclease sequence
atgaaaaccatcttaggattagatcttggaacgaacagcattggatgggctgttgtccaagaaaaagataatgagatttataaatatctgaaacaggttttaggagctggaagcagaattattccaatggacgctgcccaactgggagattttgccaaaggaaatacgatatcgcaaactaaagaacgtactgaatacagaggaggtcggagattgcgcgaacgctgtttgctgcgtcgtgaacgactgttccgtattcttgatattatgggatttcttcctccgcattttgcagaagagcttaccagatatggtaagttcaaaaatgcagacaaagaacctaagatagcttggaaaaaggacaatgaaggaagaatgggcttcttgtttgtagaatcgtttaatgagatgctcaaagatttcagcactacatatcctgatattttaaagaatggcatgaaagtgccatacgactggaccatctattatctccgaaagaaagcgctgacaaacgctatcaccccgttcgaattagcctggatattactcaatttcaaccaaaaacgtggctactaccagttccgtggtgatgaagaacaggctgaaaccacaaaatatgaggaatatctcgctcaaaaggttgttgacgtcatagacacaggagagaagaaaggcaaaagcacatggtttgacatcgtgcttgaaaatggtatggtatatcatcgccctgccgacacaaaaccagactggataggcaagacaaaagagtttatcgtcaccaccccactcgacaaagacggcaacccaaagaaagacaaaaagggaaacatcaagatgtcgttcaggatgccaagtgaagacgactggaatctacagaaaaagaaagcagagaaagacatagacgaatccggcatgactgtcggagaatacatctatgatgctttgcttcataacccgaaacagaaaatcaagggaaaacttgtaagagtggttgaacgcaaatactacaaagacgaacttagaaaaatattggaatcacagaagcgtttcattccacaactcaccgatactgcattatacaataaatgcatagaggaattataccaaagcaatgaggcgtatcgcaattctatatctgcaaggaatgatttctcttatctctttgtcgacaatgtcatcttctatcagagaccaccgaagagcaaaaagtctttgatagataattgtccatacgagagtcatttatatataaaggatgataaggagtacaaagcacccgtaaaatgtatcgcaaagtcacatccgctataccaggaattcagactctggcaattcatatcaaatctccgcatataccagcgccaaatgcagattggcgataaagtgaagcttgatgttgatgtcaccaaccaatatatcccgacagaagaaagtcgtgaagccctattcgattacctcaacgacagaacggagataaagcaagacaccttgctcaaagactttttcaatatgaaaaagcctaagaacaaggatggtgtattcccatgcagatggaactatgtagaagacaaaagctacccctgcaatgagacaaggggaaaaattattgccaatctgaagaaagccggactctcttctgattttctttcaaatggtaacaacgaagaagcattgtggcacatactttactcagttgaagacaaagacgaattaaggaaagcccttgcccgatttgctgcgaaaaactcacttgacgacagattcacagaagcccttgccgacattgagccttataaaaaagaatatggcgcatactctgccaaggccttaaagaagctgttgccattgatgcgtttgggtagatattggaactataaccatatagacacagaaacccaagaacgtgtcaactgcattatcaacggagagtatgacgaaagcataagaaaccgagtgagagagaaaactatctctctcacttctgcaacacaattccgtggtcttccactatggctcgcatgctacatcgtatacgaccgtcacagcgaaagagcagaaaccggcaaatggtcttcacctgaagatatagacgaatatctgaacgacttcaagcaacattcactccgcaaccctattgtggaacaagttgtcacagaaacattgcgcaccgttcgtgatgtctggaagaaacatggcaagatagacgaaatccatgttgaattgggtcgagaaatgaaaaaccctgccaacaagcgcaacgagatgaaccgacgtatgctggagaacgagaatgccaacatacgtgcaaagctactgctcaccgaatttctcaatcctgaactcggtattgagaacgtgcgcccatattcacccagtcagcaagaactgttaagattatacgaagatggtgctatcagtaatgccggcaatgatatagatgatgaaatatccgacattataggcaaactttcacaagtagatataaagaaacaacctaccacatcagaagtaaaacgctatatgctgtggctggaacagaactatcgttcaccatataccggagaaatgatacctctggcaaaactcttcacgtctgcttacgagatagaacatgtgataccacagtcgcgatatttcgacgactcattctccaataaggtcatctgcgaagctgaagtcaacaaactgaaagaccgcatgctcggatatgagttcatcaaacagcacaaaggggaaaaagtgcagctcagcatgggacgcaccgtcgaaattctctctcctgaagaatacgtacgccatgtggaatctcaatacaagaacaacaaggtaaagatgcgcaaacttctgatggacgacatacctgatgaatttatcaataggcagctaaacgacagcagatacataagcaaactcatcatctcacttttatccaacatcgtacgtgaagtcggtgaggaagaggcaacatccaaaaatgttatcagttgcaacggtgctatcacagaccgattgaagaaggattggggcattaatgatgtatggaatcatatcatcctgcctcgcttcgtcagactgaacaagcttacaggaacagacaagtttacaactgtgaacaaggagggacacgaagtgcccactatgcctctcgaactgcagaaaggatttaataagaaacgtatcgaccatcgccatcatgccatggacgctatcgtcattgcctgtactactcgcgaccatgtaaacctactcaataacgaggctgcaatgtcgaaaaacaatgccaacagaatacagctttcaaagaagctccgacgatatgaaactgtagaagttgtcaaggatggcatgcgcaaacagatatcagtagcaaaggaattcaagaagccatgggatagtttcacaacagatgtagagcagatcctaaaaggtatcgtagtaagtttcaaacaaaacttgcgtgttatcaacaagaccacaaactattatcagcatatcaaggacggaaagaaagtgttctcacctcagagcaaaggcgactcgtgggctatacgaaagcccatgcacaaagatactgtatttggcgagataaaccttagacgcataaaggatgtttcattgaaagaagctatgaagcacccgaaggatattgccgacaaagaattgcgagagaagattcttgaacttatggcgttgcaatacaacgagaaaaagattaagctgtattttgacgaaaacaaagatgtatggagtgacgtaaatactaagaaaattagtatttatttcttcactaaggagaccaatgaacgtttcttcgccacaaggaaagttctcgatacttctttcgacaagaagaagattcagacacaggttgccgatactgcaatacagaaaattcttctcaagcacctatctgcccatgaagacaatgcggaaatagcattttcgccagatggcattgacgaaatgaaccggaatatcatagaacttaatgacggaaaatgccatcagcctatgttcaaggtacgtgtatacgaaaaagcggagaaattcgccgttgggcaacaaggaagcaagaaaaagaaatttgtggaagcagccaaaggcaccaatcttttctttgccatctatgaagaagaacagatagacaataaaacgggaaatgccgttatggtgagatcattcgacaccataccactgaatgtggtcatcgatcgggaaaaacatgggctttctcctgcacccgaaaataaaaatggaacaaagcctaaatatgttctctcacctaacgacttcgtatatgtacccacagaagaagagaaggcaactggcaggataagaaagcttctaaacaaggagcggatatacaaaatggtcagttgtacaggaaaagaatgttattttgttccctattcttctgcgaagccaatctacgacaaagtggaatatttttccctaaataaaatgggacgtgcattgtctggcgaaatgatcaaagaaatttgtataccattatccatcaatcgtattggtgaaataacaatttgtgaatag

SEQ ID NO: 140 - DNA, 4446 bp, Unknown
  OMNI nuclease sequence
atgaaaaatattttaggtcttgacttaggaaccaatagtattggttgggctgttgtcacatccaacgacaatacaaatgagaaacctcaagttgaattaggtagcagaattataccaatgagccaagatgtacttggtaaatttgatagcggagtcacccagtcacaaactgctgaaagaacaggatatagaggtgcgagaagaattcgcgaacgttatcttctgcgtagagaaagacttttcagagtattgcatattctcggatttctgcctcggcactttgaagaatctataggatgggataaaaacgacaataagacctatggaaaattcaaggatgactctgaacctaaactggcatgggatgatagtgataaaaacaacaatcactttatatttgttgattccttcaacgaaatgttagaagagttcaagaaaaaaaatccatcatttataagtagtgataagaaaataccctatgattggaccatgtactatttgagagacaaagctactcgtcaacctataagcaagcaggaactagcttggattatattaaatttcaatcagaaacgcgggtattatcagttacgtggagaagatgaagaggaaaatacaaagcataaaacagaagagtattacgaactaagaatcgacagagtagaagctacaaatgaaaagagaggaaatgacatatggtacaatatatatttggaaaacggatgggtttatagacgttcgagtcgaatcccccttgaggattgggtaggaaaaaagaaagaatttatagttaccacggaatacaatgaagatggaagtattaaattagataaagacggtaatgaaaagcgttcattccgagctcccaaagatgatgattggggactgcaaaagaaaaagacagaattccaaattgattcttctgaacagactgtgggtagcttcatatataatcatcttttagctaacccaactgaaaaaattcgcggcaaagttgttagaacaatagaacgtaaatactacaaacaggaactggggaaaatcttagctaagcagaaagatttcataccggaactctcaaactctgctcttcttgaacaatgcattcatgaattgtatgcaaacaacactgcgcatcaggatagtcttaggaaaaaagacatcaattatcttattatagatgacattattttctaccaacgtccgttaaagagcaagaaatcactaattgcagattgcccatacgaacagtatgaatatataaataaaaatacaggtgaaataaaaaaacaacacattaagtgcattgcaaaatccaatccttattatcaggaattccgtatatggcaatttattcagaatttacgactatacagcaacgacttagacaatacagatgttaccaaaaactatttaaagaacgaagaagattatgtccacctattcaaatatctgaacaacctaaaagaaatatcccaggaaacattattaaaagatttcttttcgattaagaagcccaaaggtaaagactctatatatcctgtcagatggaattatgtggaagacaaaaaatacccttgcaactctactcgctatcaaatgttagcagctttaaaggatgcggaaataccagacactctcattgataacaggaatacagaataccgtttatggcacctcctttattcagttgaagacagaaacgaattaatcagcgcattatgctcatttgccagagacaataaattgccagaatcattcgtagattgtttcaaaaagattccgtcttacaagaaggaatatggagcatattccgagaaagcagtcaagaaattactttccgtaatgcgggtgggaagtctctggtcagaagataatttacccaacaatatccacaacgtgataaatggcacaattgatgagaaagtaaaaaaacggatagaacacaaaggttttttcctttccgaaaaacaaagtttcagaggattgcccgaatggttagcatgttatgtagtatatggtaggcatagtgagacaagtgacatttcaagatgggaaacgccacaagatttagctaatttcattcacgatttcaaacaacactcactccgtaatcctattgttgaacaatgtatattggaaacccttcggactgttcatgatatatgggtaagacacggtcgtattgatgaaattcatgtggaacttggtcgtagcatgaaaagtactgccgagcaaagagaaagaatgtccaaaacaatcatccaaaacgaaaataccaatcttcgcatcaagaatcttctcttagaacttaaaaacgattcaaccataaaagatgtacgcccctactctccaatgcagcaagacttacttcgcatttatgaagagggagcactactgactctcaaacgcgatgataaagactataatgaaatttcccgtatttcaaaactttccgcccctactcagagcgaactgacgagatataagctttggcttgaacagagataccgttctccttatacaggcaaaacaatttccttatccaaactattcacacctgcttatcaaatagagcatgtgataccacaaggacgttatttcgatgattcgttttcaaacaaagtaatttgcgaagcagaggtaaaccaacgcaaatcaaacatgcttggatatgagttcatccaaaaatgtggtggagaaattattcattgtgcaaccttaggagatgtaaaagtattaacggcaaaggaatataaagattttgtgtcagatcattacgaccctaaatcatctaaggctcagaaactaatgatggatgatattccagaaacattcatccaacgacagatgaacgatactcgctacattagtaaagtaattaaaagtttgctatccaatatagttcgtgaaaaagacgaaattgatgcaatttcaaagaatgtcattccttgcactggtggcataacagaacgtctgaaaaatgactggggactcaaacatgtatggaatagcattgttgcgccccgttttatacgtatgaatcagctaacaaattccgaagctttcggacattgggaaaacaaagatggtaagcgagtattccaaacgactatgcctatagaactcgaaaaaggatttagcaagaaacgtattgaccatcgccatcatgctctggatgctcttgttatagctcttgcatcaagaaacatcatcagctatcttaacaacgaatcagcccgcgatacgaatcgaagagaagatttaagacggctgctttgcgacaaaaatcgaatcatacgaaaaccttggaatacttttactcaagatgcttatgtagctctccaaaacatcgtagttagtttcaagaactatgtccgcgtcatcaataaagccagcaactattatgagcactatgatgaaaacggcagaaaaaaacctattgctcaaaagggagaagaacaatgggctatcaggaaacctctacacaaagagactgtatttggacaagttaacctacaacgaaagcgcgaagtatcatttgcaaaagctatagagcaggtttcatgtattgttgacaaagatctacgcaataccatcaaatctatgattaaagcaggtatggatgaaagccaaatcagaaagcattttaaagcacaaaacaatatctatgcaggcaaatcaataaacaaggtcgaagtttactattatacagactctgttgaaccgatggttgctacccgcaaacttctggatgacagctttgatgaaaagaaaatacttagcataactgatactggcatacagtcaattttattaaactaccttgaagcaaaaggtaatgatcctaaattggctttttccccagaaggaataatggaaatgaatgaaaacatagcaaaatacaataatggaaaatttcatcaacccatcattcgtgtcagggtgtcagagccgaagggtgaaaagtataatattggaacaactaagaataaagccaagaaatttgtagaagcacaaagtggaacaaaccttttctttgcaatatacgaaacagaaaatggtaatcgctcatacaaaactattccattcaaccaagttgtagaacgaatgaaaatgggatggacacctgttcctgaaaagaacgagaatggagataagctaaagttttatctgtctcctaatgaactggtttatgtgccaacagaagaagaaaggatgtcaaactcaattaacatcaacaaagacagaatctacaagatggtttctgctacaggaaatcaagtattctatgttcgacataatatagcatctgttattgagaacaaagtagaattacaatcactaaacaaaatggagaaaacaatggaaggagaaatgataaaatccatttgttggaaacttgaagttgacagactcggaaacattacaaatatcatacgatga

SEQ ID NO: 141 - DNA, 4341 bp, Unknown
  OMNI nuclease sequence
atgaaaagaatattaggacttgatttgggcacaaatagcattggctgggcattaatagatggagaaaagaacacaatcattaaggcaggcagtaggattattccgatggacgcaaaagccatgagcgagtatgaaacaggaaacttgcagtcagcaacttccgtaagaactgatttcagagggactcgtcgcctctacgaacgtgccgtcttgcgaagggaaagactcctaagagtgcttaatgtcctggggttcttgccagaacatttcaagaatcaaatagattttgaaaagcatttaggtcaatttatcaatcatggcgagccgttgttgccatataggagaacagaggataacaagaatgtctttatttttgcggattcattttacgagatgattgcagatttctccttgcatcatccagaactaacagagaatgggaagcgagtcccttacgactggacaatcttctatctccgtaaaaaggcactatcaaaaccgataaaaaaagaagagttggcatggttgattttgaatttcaacaccaaacgtggctattaccagttacgtggcatggaaaatgaaacgaaaaccaatgatggtgaagaatacaagattttaaaggtcatagacgttgaaaagacgaatgaggacaagaaacgcaagggaatattctggtacgaaataacttacgagaatggagccaagcaaagaaaatccggccctgtcgcccctaggaaaatcggcgatatggttgaagtcattgtaacaacttcttatgacaaagacggcaacatcaaaacagataaagaaggtaatcccaaaataagcataagtacaccatctgccgacgaatggaaacttctgaaaaagaaatcagagaatgccattaaggaaagcggcaaaaccgttggtgagtatatttacgatgagttacttgtcaaccccaatatcaaagtgaaagggaagttgataagggttatcgacagacctttctataaagatgaactaaaaagaattattgataagcaatcggaattcattccagaattacgagatcggtccctttatgaaaaatgcattcgcgaattgtatcatcaaaacgaggctcacgtacaatccatcatggacaaatcttttacagatctttttgtggaagacattatattctatcaaagaccactaaagagcaagaagtcagaaattgccaactgtccatttgagaactaccactatattgacaaagaaagcggggagattgttaacaagcctatcaagtgtatcccaaaatcacatcctctgttccaagaattcagactcttacaattcacacaaaacctcaaaatattcaaacgggagaaagttgttaacggcaaactgaaaaccgacgttgatgtaacatcagactttctttccacattagaagattatgctgcgcttttcgagtggctaaataacaaaaaggacataaacgaaaaagaacttcttcggtacccgtcattcaatatagggaaaaatgtttctgaatatagatggaactatgttgaagacaagtcttatccatgcaatgagacacattatcttatcaacagacaacttgatgacgttggcacatctttaacccctgatcaagagtgtgctctttggcacatcttatattctgtagatgacattatcttactaaggaaagcgctcaaatcatttgctaagaaatacgatattaataccgaactctttgtgaaggcttttgagcacatcgaaccattcgacaatgactatggggcatattcagaaaaagcaataaaaaaacttttaccgtttatgcgaaaaggcatgagacttcatgatgcatgttacgaagtatatggaagattctcagaaacagcagatactgacaaatggactacacctgaggacattgaccgttatcttgaatttgagttcaagcaacattctcttcgcaaccctgtagtagagtcaattttgggagaaaccatgagagtagttcgtgacatatggaaaacttatggcgaaatctctgaagtacacgttgagatggggcgcgaccttaagaaaagcaatcaggaacgtagagatacgaccgacagaattcgaaaaaacgaacaaacaaacttgcgtattcgtttattacttcaggaattccttaatccagaatacaaaatcgatggcgtgcgtccccactctccttctcaacaagaaatattcaagatatttgaagaaaatgcgcttgcaaatattaacgaggatgcagaatctgacgacattcaaatgattgctgacaaccttgggaacccctccaaacatgttagccagtcggaaatcatgcgttatcgcctatggcttgaacaaaaatacaagtctccttatacaggacaaaccataccactttccaaactgttcacaacagcgtatgaaattgaacatgtcattccccaatcacgctactttgacgactctctaagcaataaagtaatctgcgaaagtgaagtgaacaaactaaaagaccgtatgctcggctatgagtttataacaaaacatggtggggagattatacaaggaaattttggcacgcaaattaaaatattggacaaaatccaatatgaagaatttgtgaaacagcattacgccagcaacaaggggaaaatgaagaagttgctgatggaggatattcccgacaattttatcgaacgtcaactaaatgatagcagatatattgcacggaagaccatttctattctttccaaacttgtcagggaagaaaacgaaacagaggctacttcaaagaatgtcatcgttacgactggaaatataacagatcgtctaaagaaagaatggggcgtaaatgctgtatggaacgacatcatagcacctcgttttataaggcttaatacgattactggaacacataattatggagaaatgattaatcgtgaaggcaaacagtatttccaaatcaatgttccactggaaatatcacgaggatttagcaaaaaaagaatagatcatcgtcaccatgccatggatgccatcgtaattgcatgtaccacccgaaaccatgtaaactatcttaacaacaaagcggcactttcctcagagaaagacttacgctatgacctacaacacaaactttgtacaaaagtgaaaactgacgaccgagggaactacacttggcaattcaacaaaccttgggaatcgtttacgcaagatgttagaagagaattggcatctattattgtcagtttcaaacagaatctgcgtgttatcaacaaaatgacaaatttctattggcattatgaaaatgggaaaaaagtattaacaagacaaacaaaaggtgacggatgggcaattcgcaaatcattgcacaaagcaggcgtgtctggtactgtcaggctacaaacgaagaaaacagtaaagttatcagatgccctcaactgcgttagtatgattgttgacaaggaaatccgtaaggagataaaggatgttatttcaacctatgggaaactgtatgaaaagaaaaccattttaaagtatttcaaggacaggaactacaaggttggcaagaaagatgttagccgtgtggaaatttattacaccccagaaatcgcagagttatctgcaaaacgcgtattgcttgacacttcttttgacgagaaaactattaaatctataacagacacaggaatacaaaatattctgctgaaacatcttgccaacaatggcaatgaccccaagattgctttcacaccagagggtattgccaacatgaacgaccacttgaaagaacttaatgatggaaaagagcacaagccgatactgagagttcgcaaaacagaatctttcggattgaaattccctgtcggagaagtaggaaataaaagtaagaaatacgttgaagcagacaagggcacaaaccttttcttcgccatatatattgacgaggacggaaaccgtagttatgaaagtattccgttcaatgtagcagtagaaagattgaagattggagcacaagttgcacaagaaataaacgaagaaggaaagaaactgttattcgttttatcacctggtgacctggtatatattcccgatgaaggagagcatgtggatgatattaccaataataacagaatttacaagatggtgtctgcatctggaagacaatgtttttttgttccttattatatagcgagtcctattacctgtccattagaactcggagcaaacaacaaagcagaaaaaaattgggatgatattatgattaaatctacatgcgtaaaacttcaagtcgatcgtcttggcattgtaacgaaaatcttccagtag

SEQ ID NO: 142 - DNA, 4347 bp, Unknown
  OMNI nuclease sequence
atgtcaaacaaaatattaggaatagaccttggtacaaattctatcggactatcattgaggaatacggaaattgtcggtgggattaaagagcaactcgaatatttttcatctattattttcccgtctggtgtgggtaaaaacaaaactggggaattctcatatgcagcagaacgcaccaaaaatcgttcaacaaggaaaatctataaagttcgcagatataggaaatgggaaacattgaaactgttaatagaaaatgattgctgtcctttgtcaatggaagatctgcagaaatggagcaagtatgacaaaatcaaaggacttaaacggcaatatcctatacatgcaacccatttcgagcagtggatacgcctagactttgacggtgacggcaaggctgattacgccagtccatttgagttaagggctatactaatggaaagacaatttgacttctccgaaatgacagaccgttataagttaggacgagcattatatcatattgcgcaacgaaggggtttcaagagcagcaaaggagaaacattaaaagagcaagagcaaaacgagaaaggggaactccaggaagttgacatcactgatgcgttgaagaaatccgaagaaaagaaatcagggaaactcacagaatacatgaaggtgcataaccttcctacggttggctgcgcattcaaccatttacttaagaacggcatccgtgttcgcaatagtgaataccaagccgtacgttcacaatacaaagaagaaataagttgcatttttgaattccaaaaaggtttagataaggaaagtgatttctacaaaaggttggttagcgaaaagaagggagagggaacaatattctacaaacggccattgcgttcccaaaaaggtgctgtcggtaaatgtaccctcgagccaaataagccgcgatgccctattagccaccctgagtttgagaagttcagagcatggagtttcattaacaatatcaaatttggcgaggatcttagtgaagaactcactctgaagcagaaaaaagacctgtataaggagaaatttctcttatcaagaaagtctttcaaatttgaagtcattcgcgaatggatatgcagaagaacaggaatgacactgaactacaagaacaaaaccatcaacttcaaagacagcacaagtgtttctggttgccctatatcaggaaggctcaagaggctgcttggcgatgattgggaatgttggaaacttgaatctaccgagaagaaaatcaacaagaagactggtgaggtcagaaaaatcacatatgatgtctacgatttatggcatgtctgcttctcttttgacgaggcagaatatgttgatgattttgccaagagcaaattgaaattcgacgacaaccaagcaaagcaattagttgccattttcaatgacattcagcaaggatatagccaactgagtctgaaagctattaggaatatcaatatgttcttacaagaaggactgttatataacgatgccgttttgctggctaaactgccggatatatttgggtgcagatgggaagaagcaaaagaatacgttgtttctcaaatagacagtataataaaagagaacaggaaagaaaaactactgtattccattgccaaccaacttattggcaattacaagtgtttgagttatgacgaacgatttgccgaccacaactttgattacatcctagacgattccgattataatgacattaaaaatgctattcttaatgttattggagaaaagaaatggtcaaagaaagatacgtcggaacagtccgaaatattaaatgatgtagcacaactgtatcaaggctttttcgcgtctccaaaacgggattattacaaaacgaggaaagtggcagatgctttggctgagtttttgtcaggcaagtatgatttcctacctaaaaaagaattgaataaaatttatcatccttcaatgatagagttctactctcctgcaaaggagcaaagacttgatgacggcagatggctgaaactgttgggcagccccgttattggagcgatgaagaatcccatggcgatgcgcgtactgcacactttaaggaagcgtataaatgccatgctaatggaatctatgatagatgccgatgatactagaatcgtcgtggaaactgcaagggagttgaacgatgccaacatgcgctgggcaatagaagcatatcagcgagaaagagaaaaagagaataaggaatacgagaaaatattaaaggagtattacccaggacgaagcattagtgacaaagaaatcgaccaagtacgcctaatgtgcgaccaacatgacatcccaggagatgacaacaatactgatatgggaagaagaaagacggctaaaaataaaaaagaggtgcctcctgtttataagaaagatgttactagatatcgattatggttagagcaaggctgtcgctgtttgtatacaggaaaaataataaatattacaaaattgttcgatgaaaatgcttttgatatcgagcacaccatacctcgaagcatctctttcgatgattctttgaaaaaccttactatatgcgatgcccattacaatcgttcggtaaaaaagaatcagatgcccacacaaatggcaaactataaggaagatgccaatggatacaccgcaatattaccgagactgcagccatggattgaaaaagtggagcgattgaaggacaacgtggccttttggaaagcgcaatcaaaactatcgcaagacaaagaaagaaaagattattgtatacgtcaacaccacctttgggtaatggaactagactactggaaagggaaggtggagcgatttaccatgaccgatgtgacgtcaggtttcagaaacaaccaactcaatgacactcgtatcataacaaagtatgcgtaccattatctcaagactgttttcgacagggttagtgtgcagaaaggcagcgtcaccgcaaacttcagaaaaatactccgcattcagagtgttaacgagaagaagagtcgtgaaaagcattctcatcatgcgattgatgccacagtgcttacattaattcctaatgcagaaatgcgggacaaaattataaagactttctatagtatcaaagaaagagaacgtttcaacgaggatgcttctgcactgaaaaaagaattggccaaagaactgaaaaactgccaactgcctagcaacatctccgagatagttccatttatagaagacaacattctggtaaaccacatatcaaaagaccaaacgcttactcctgcacacaggcgcaaacgcataagaggaaagattgttcctaaaagagacgaacatgggattatcttatacgaaacaaatgctgacggcacgacaaggaaaaacaaacatggccaccccattcctcaagcaaaggaatggataagtggcgacagcattcgtggacagttgcacaaggattctttctttggagcaataacccaatggttaaaggacaacaatggagaaaaagttcttgacaaaaaaggaaatataatatcagatacaaaaatatactatgttataagaagaatcttgaaatataagtcatcagatactgattctggattcaaaaattgggaagaacttaaatctgtaatagtagataaagacctattcatgattatgaagaatcaattcccagagaacacttcattcaaagatgcctgcgaacatggaatatacatgtataagaacaataagagtggcatattagacttttccgatgaatgtaagttgacaaagattcgccacattagatgttttacatctgtaaaaaatccgcttgcaataaaaagtcagacttatttatctacaaaaccatataagcaaaaatactatgccgatatgggagacctgtatgcaatgtgcagatatgaaagtgttgacaaaaaagaaagggaataccaactgttcagtttatttgacattagcaaaaacaggaaactcggattggaagacattcctactactattgagagcaaaaagaatcatagattattcttaatacacatgttaaaaaaggggaacatgttattagtatataatgattcggaagaagcacttaaggaaaaagacaacaaagcattattacagcatttatatgttgtaagaggatttgaaaatgacgggaatagaattattctccaaaaacacgtcaatgctcagcaagataaggacttaggtaaaggagagtctgtcaaaggctcacatcaaatgccagaaaaaataagatgtggcataaataccataaaatacttattatgcggtatcgattttaaaataactcccaaaggagttgtgtttgtctga

SEQ ID NO: 143 - DNA, 4539 bp, Unknown
  OMNI nuclease sequence
atggatgaaaaacggcatatattaggcttagaccttggtaccaatagcattggatgggcggttgtaggtgaaactgtcgataatgtaggaaatcgtaaaattgaagagataattgatgctggtagcagaattattcctatggatgctgctatgcagagtgattttgcaaggggcaatagcatatcacaaacagctgacagaacacgctaccgcagcgttaggcgactacgtgagagatgtcttctgcgacgagaacgcctccacagggttcttgctcttatgggattcctaccgaagcatttttcagacaatttgacccgttatggaaaattcaaggatgatgtagaatgcaagttagcgtgggcaaacgatgataatggacaacctgcattcgtttttaggcggtcatacgatgaaatgctacagttgttttggcaagttcatccagaacttatgaaacaaggaatgaaagtgccatacgactggactatctactatcttaggaagaaagctcttacagaagctatctctggagaggaactcgcatggatattgctcaatttcaatcaaaagcgtggctattaccaaacacgtggcgaggagcaagaagaagacaaaacaaaaaaagaggaatactatgccctgagagttgtagatgttgttgacacaaatgaaaaaagaggtagggatacttggtatgatgtccatcttgaaaatggttttgtttatcattgcaaatcaaaggagaagccagattggataggtaagattaaggagtttgttgtcactacacaacttaatgaagacggaagtcctaaaacagacaaagacggcaaagaaagacgctcattcagaatgccgtcggaaaatgactggggacttgtgaagataaagacccaagccgatattgaaaaatccggcaacaccgtcggaacatatatcttcaacgcattgcttgccaatcctaaacagaagataaagggcaagttggtacgtactatagaacgtgatttctacaagtatgagttgtgtgccattctcaatagccagaaacgctttattcctcagttacaagacaacaatctatatgaagattgtatagaggaattgtaccaacagaatacggcttatcgcaattccatatcaagccatgattttacctatctgtttgtagataatatcatattctatcagcgtccgctaaagagtaagaagtctttgatagacgaatgtccttatgaaagccatgtttatatagataaggatgggaatacggtggaaaaccacgtcaaatgtatagccaagtctaaccctatgtttcaggaattcaggctatggcagtttgtttccaatctgaaaatctatgagcatcagaaagatgaaaatggacgcatattggaagataaagacgtgacttgcatgttccttgcagacgaacattcacgtgcggcgcttttcacatatttgaatgaccgcagtagcattacacaaaaagaattgcttgaaaaatatttcaatattaagaaaccgaggaataaagatgctgagatgccatacagatggaactatgtggaagacaagcaatatccttgcaatgagacgcgtggagagataataaaaaggttatccaaagccggtatcgacactgacttccttgatcatcaggcagaaatgtcgctatggcatatcctgtatagcgtgaatgacaggcttgaacttcataaggcccttgaaagatttgcacaaagaaatgacttaggcagcgcatttgctggaataatgtccaagttccctccattcgaatcagattacggagcatattccgagaaggctataaagaaactattgcctctaatgcgaatgggcgactattggcatgaagaagacatcgacaaatctacacttgcgagaatcaacaaaatcattgatggagaagttgatgaatctatcagcgagagaacaagaaataaagcaatttcattgaccaatgtaaacaatttcaaaggcctgccgctttggctggcatgctatgtcgtgtataatagacatagcgaggctcaagacaatgacagatgggaaaaacctgatgacattgatgcatatctcaagaaattcaaacaacattcactaaggaacccggttgtagagcaagtcgtaacagagactctccgtgttgtcaaagacatctggaaaactcacagccacattgatgagatacatgtggaaatgggacgtgacatgaaaaatccctccgacaaacgcaaaaagatgacagaacgcgcaatcgaaaacgagaatgccaacttgcgtataaaggctttgcttgccgagtttcttaatcctgaatttggtattgagaatgttcgcccttattcgccgagccagcaggagattctgcgtatctatgaagacacggccctaaacagtgtggacgaacctgatgactacatacaggaaattgttaacaaatttacccaaagcgatgtgaccaagcgtccgactcgctctgaggtgttgcgctataaactatggttggaacagcattacgtatctccatatactgggcagacaataccactttcacgtctgtttacgacagactacgaaatagaacatgtcatacctcagtcaagatacttcgatgactcattgtctaataaggttatctgcgaggcagcagtcaacaagctgaaggacaacagtcttggatatgaattcattctgaaacatcatggagagatagttgaacttggcggtggaaaaagagttcaaatacttgaagccgacagctattgtgcatctgttgagaggacatacaagaacaaccgtgcaaaaatgaagaaactcttgatggaagacataccttcggaattcatcgagagacaaatgaacgacagcaggtatataagcaaactcgtaaaaggtctgctatcaaaaatcgttatggaagaagacgaacaagaagcaacatcgaaaaatctcatcgtatgttctggcagtgtgacagacaggcttaagcgtgaatggggtatcaatgatgtgtggaatcatattgttctaccacgttttattcgaatgaacgaattgacaggcacagccaggtttactacaacgagttcatcgggtcatcttattcctgatatgcctttggaactccaaaagggcttcaacaagaagcgtattgaccatcgccatcatgccatggatgccattgtcatagcatgcaccacgcgtgaccatgtcaatcttctcagcaatgaggcagcatcgccaaagagcaatgccaaccgtcaccaactctcgcataaatttcgtagatatgaaactgtaaaggttgaaaaagacggcgaggtcaagacaatatccgtagcaaaggagtttataatgccatggccatcgttcccgactgatgtggaaaaggtcctaaatgatattgttgtcagcttcaaacagaatcttcgagtcataaacaagacaagcaatcattccttgcgctatgtagacggcaagaaaaaaatggttaagcagactgccggcgacagctgggcaataaggaaatccatgcacaaggagacggtatttggagaagtcaatttaagatttgtcaagtctttcccattaagtgaagccattaaaagacccaatcgcatccttgacaaggaattaaaggagaagattaaggccatggtcaagcttgaatatacagagaagcagataaaagcatacttcaaagagaacaaggatgtttggagtgatatcgacttgaagaagatagacatgtactacttcacaaaagagacctccgacagattatttgctacaagaaaaaatattgatacctcgttcaatgaaaagaagataaaaggcgaaatcactgataccgctattcagaagattatgctaaatcatcttgcaaaatatgaaggtaaatccgaatttgccttctctcctgatggtattgatgatatgaaccggcatatcaaggaactcaatggcggcaatgaccatcaaccaatatacaaggtgagggtttatgaaaaagctgacaaatttgctgtggggcagaaaggcaacaaaaagacaaagttcgtggaagccgcaaagggtacgaacctgttctttgccatatatgagaatgaggtgcttgacaagaagacaggtgaaatgatcaaaaagcgttctttcagaactatcccgctcaatgaggctatatcaaagatgaaggctggattacagctcgatgaaaaggctgcattcattctctcgccgaatgacttggtgtatttaccaaccgagaaggaattggagagtggagagatttctcatccaatcgacaatagtcgaatatacaagatggtatcttcatcgaaatttcaggtgtactttgttaaggtcaacgttgcagcctccatccaagacaagtgcgaattctctgcactcaataaaatggaaagagctttgtctggggaaatgattaaagaaatctgcatccccattaaggttgacagacttggacatattattaagataggaatatag

SEQ ID NO: 144 - DNA, 3753 bp, Unknown
  OMNI nuclease sequence
atgaatgtgcttggacttgacctcggacctacatctataggatgggcccttatagagattgaaaacgataataatcctgtatcgatattgggaatgggcagtcgtattattccttatagtaatgatacggctgcctcggatttctccaagggcaagggcgagagcccgtgctcagagcgcacccgctgtcggcaaatgaggcgtaatattgacagattccagttgcatcgggaacaactgcgcaatctgttgcttcaaattggtatgattgataagaatttcaaggcctcgccggcaagccctctggagatatggaaatcaagggctgatgccgctactccaggggtaaaactgccacttgataagcttgcggctgttttgttccagatcaatcacagacgcggttacaggcacagcaagtcagatctcggagattcaaaacaaaccgagtatgtggcaaaaatcagtgaccgctattcggaaattcgacagaccggcaaaaccgtaggccaatatttctatgggaagcttaaggattccgaagtcattaatcccaatggcacaagatactgcacataccgcgtaaaggagaaagtatgtcctcgtcaggcctatgaagaagaagtggatagaattctttctgtgcaaagtgagttttatcctgacgtattgacaacggagaatcagaaagctatcaagcaggtgattttctatcagcgtccgctgaaatcttgcaagaatcttgtctcgttttgcgaatttgaacggcatcagttccttaacaaggccggaaagaaggtggaaagcggtccgaaagtgacacctcgcacctcgccgttagctcaggtatgtcgtatatatgaggctatcaacaatataaagcttgtgaattctcggcggaaacacaagaaatccgattcggcaccctctcttttcgatgatccggccgttacgggtatggatctccgaaaattcaaggaggaatatccttttacggatgaggaacgtgaaagaatttttcaattcctcaatacgcatgaaaaaatgactgaaaaagatcttctgaagatattgaggcttacttcagaagacggattcaagtgtgacaagtcacttggaaagggaattcaaggcaatactacgcgctggcagatagctaacgctctcgggaatcatccggcaaaggaagaacttcttcgctttgacatctcagaggagatacccgcagagaatccggacattgttgtttcaaccggagaagtgcttccgcgtatatcgccctcgtacgtcggacagccgttctacatgctctggcatacgctttattcaattaacgataaagacgagctgtttaaagtcctttcggagaaatttggaattaaagacgaagagactctcaaccgtctttatgcgctggattttgtcaaggcgggttatgccaacaagtcggccaagtttatccgtaagctcttgcctttgcttaagaggggcatgatgtatagcgatgcctgcgcattgctgggcgtcaaccatagcaacagcatgacaaaagaggagactatgagcagggaattgcaaccccatctcacgcctgtgcttaaaggtgaactccgccagccggttgtggaaaagatactcaaccagaccataaacgtagtcaactccatcattgatgaatacggggagattgacgaggtgcgcgtagaactcgcccgcgaactcaagagagacaaagaagggcgagagaaaatggcgcagaacataaacaagaacgaacgggagaacaaagcattgattgaggaaattgccgacctgaacatattgccaacccgcaggcgtattcagaaaatgaaaatgcttaaggagaccggcaacaggtgcatgtactgcggcagacctgtcactccctatcagttcatagagggtcatgggtatgaaatagaacatattgtacctcgttcacgattgtttgacgacagttttaccaataaggtctgtgcctgccgggaatgcaattcggcgaagggagcgatgacagctttcgatttcatgaaaacaagaggagagcaggaattcaattcctatcttgacagagtggaatcgctgtacaaggaaggcaagatctcgcgtggcaaaagggaccggttgttgatgtccgctacgacaattcctgatgatttcatagaaagggatttacgtgagacccagtatatatcccgtaaatccatggaaatattatccgagtctatccgcaatgtgcatgcttcatccggcatggttacggatttcttcaggcatgcctggggctatgataccattctgcatgacatcaatctccctcggtacagtgaggcgggactggcggaggaagtggaatatgagacacatggacagaaacatgccgcgtacagaataaaagactggtcgaaacgaaaagatcaccggcatcatgcgcttgacgctttggtagtggcattgacccgacagggatatatacagcgtctcaatacattgaatgcttcaaccgagaatattggtaatcttgacaaatgggcagcggagaggcctcatatcgagagacaggcggttgtcaaagcgctggaaaacgtggcgatttcattcaaatcaggcaagaaactcactacacccggcaaacgatacatacgtaggggcggacgccgtatatgcgtgcagacaggagtgacagtcccgcgctctccgttgcataaggataccatatatggatgcataagggttgacgatggtatgaagagcctgaagttcgctctgcagaatctcaacctcataaaagataagggtatcagtcagcagcttgcatcgtgtttgcaggagaatggcggcgacatcggcaagacgctgaaggctttgaaaaagaaccctctgacaatcaatggcacacccgtggagaatgtcgcatgctatcgtgaggagatagttgtaaagtacaagataggggctgttacgcgcaaggacgtggaatatatcgtggatggccacatacgggaaattgtaaaggcaaggttctcggaagtgggtaattcggataaggagttcgttaaaagccttgcagaacgaccgttgtattccgatgaagcttgccgccatcagattcggactatcagattgttcaccggtataaaaaagtcaagcattgccggcgttcgtaaaaaggaatccggagaaatcatcggatacgctcagacacaaaataaccaccatgtggcattctatagaaatcctgatggaaaggtagtggaatctgtcgtaagtttctgggactgcataaagcgtaagaaagcaggcttgcctgccataatcaaaaatcctgcggatgcctggactatccttatggcacagggtgaatcggagagtaccgatgaaattgcccggactatgccgcccgatggcagtgcgttcatcatgtcgctgcaacgcaatgaaatggttgtgctcggcatgtcggacgacgagtggagagatgcagtggcgtctaaggatatttttacggttaatcgctacctctaccgagtttggagattgagtactggagattattgctttaagtatcatacaaatactaccgctgccattggagatggtgacaaagaattaaggcagtattatagaactacgattacatcgttattcgcgctacatcctcgaaaagtaagagttactttacttggcaagatagaccttctctctgatgataaagaaaaccttatgctttag

SEQ ID NO: 145 - DNA, 4176 bp, Unknown
  OMNI nuclease sequence
ttgtattatttgttctatttcattaaatttgtccgtcaaacacttaaaattagtataatgaaacgcatattaggacttgatttaggggtcagcagcattggttgggcattagtaaacgaagccgagaacgaaaaggaaaaatcaagcatcgttaaattgggagttagagtaaatccactcacggttgacgaacaaaccaactttgaaaaaggcaagtccattacgactaatgccgagcgtactcagaaacgcggtatgcgccgaagcctacaacgctataaactgcgtcgtgccgaacttattcggaaactaaaagaggcaggtttcatcaacgatgacagcatcctttacgaaaatggtaatcgtacgacttttgaaacctatcgtcttcgagcaaaagccgccacggaggaaatcacacttgaagagtttgcacgcgttcttattatgattaacaagaagcgcggctacaagagtaatcgcaaagccaaaggtgaagatgaaggtatgttagtcgatggcatggaggttgcaaagagactttatgacgaagaccttacacctggacagtattcgttggcattagtggaacaaggtaaaaaataccttcccgactactaccagtccgacctgcaaaccgaattacaacgcatttgggataagcagcaacctttctatcccgaaatacttaccaatgatttatggaaaatacttcaaggcaagagcaaaacctacaccaagaagagatttgatctttatcagatatcccctccaactttgaagcgtgacgaggcacggaaacaacttttgcaatggcgcgtggatggactttccaagcaactgccgattgaggttatctccgccgttgtttcggaactgaacggacaaatcaatggcacaagtggctatttaggaaagattagtgaccgcagcaaggaactttatttccgcaaacaaaccgtaggtcagtacatgatggccatattggacaataatcctaacgccagccttcgcaacatggttttctatcgccaagactatctcgacgaattcaaccaaatatgggaaacacaggcaaagttccatcctgaacttacgcaagaactcaagcacgacatcggtaacatcaccatattctatcaacgaccactgaagagccaaaagggattggtctctatttgtgagttagagaagaagaagattgaaaccattgtagatgggacaaagaaggtcgtcactgtcggtcccaaggtatgtccaaaatcctcaccgttatttcaagactttcgtatttggcagcgactcaatgacctcgaaataattgacaccgagacacgcgcccatcgcccacttgaacaagaggaaaaagaactacttgccaacgagttatccattcgggagaagatgaccaagcaacaagtattgaaatgtttgtttactaaaaccaaaggtctcgaacttaattttaaggaacttgaggggaataccacccaagcaagacttttcgccgcctaccaacagattatagacatgagcggacacggtgagtacgatttctcaaagatggcagccaacgaagcccgtgaaattgtaggtagcatattccgcgcattaggatacaaaaccgatatgctttgcttcgatgtcgctcttaaaggaaaagcattggagcaacaaccattctatcaaatatggcatctactctactcttatgagggcgacaagtctgttacaggcgatgcaagtttgattgcaaagatacgcgacctctacggtttcgacaacgacgaatatgcaaaggttataacacaagcttccttcaaacccgactatggaagtctcagtgctaaagcgatacgaaacattcttccctatatgatggctggtaataaatattcagttgcttgcgaatattctggctaccgccactctgcccgttcgctaacaaaagaagaacttgcacataaggagctaaaagacaaactcgacctgctcccacgcaatagccttcgcaatcctgtggtggagaagattctcaaccaaatgattaatgtggtcaacgagattgttgccacctacggaaagttagatgaaattcgcatagaactggcacgcgacttaaagcaaagtgctaaagatcgcgaagaagcaacaaatgccatcaaccaagccacaaaattgcacgaagaataccggaaaactctacacgacgagttccacatcgaacacccaacccgtagcgatattctgcgctataaactctatatggaactttctgcaaatggattcaagacactttactctaatacagccatcgtccgagagcgtcttttctcacgcgactacgacattgagcatataattccacaagccagtcttttcgatgattctttctcaaacaagacactcgaactgcggaatgtcaacctcaagaagggcaacactactgctttcgacttcgtcaagaacgaatatggcgaagaggcatctaaagattacaaggctcgcatcgacgacttgctcaagaacaagaaaataagttcggctaaacacgataagttactcatgacgggggaagacatcccaaaagattttatcaatcgcgacttgcgcgatagtcagtacattgcacgcaaagcccgtgaaatcctcgaagacatcgtgcgcgtagtaaattccaccacgggaacaattaccgaccgtttacgcgaagattgggggctcgtagatgtaatgaaggaactcaactggagtaaatacgaggccattgggcaaattgtatcgtgggtaaatcgcgatggcaataccattcgccacatcaaggactggaccaaacgcaacgaccaccgccaccatgccatggatgcacttaccattgccttcaccaagcacagcatcgtgcagtattataataatatgaatgcgcgcgcagacaagaccagcgatatctacggcattgaatgtaaagaaatggaacgccacaatgaccaccttcgttttaaggttcccgtagaaggtatgcgtgaagaagccaaacgacaacttcagaatattcttgtctctatcaagtcgaagaccaaggttgccacacgaaatgacaaccgcagtaagtcgaaatctgcaaagggaggagtaaatcacaaggtacaactaactccacgcgcccaactacacaaggaaagcatctatggccgtcgtcgcaagtatgagaccacatttgaaaaagtgggagcttcgttcgacgcacagaagatagccaccatcgccagcaaggaaattcgcgaggccatgcttcgccgacttaacgaattcggtggcgatgccaagaaggcattcacaggtaagaactccttagagaagaagcccctttggctcaatgccgaccatagtagggctgttcccctaaaggtgaaatgcgtcacgctggccgacttcttcaccatccgcaagcccatcagcaaagaccttgtgctggaaaaggtagtcgaccccaaaatccgtgcactccttcaggcaaggctcgaagaatatggaggcgatgcaaacaaagcattctccaaccttgatgaaaatcctatctggctcaacgaagaacgcggcatagccgtcaagcatataaccatcaatgctgggctctacgaccccgaacctattcacgagaagcgcgaccgccaaggaaaactaattctcgataaagaaggtaagcctatagcagccgacttcgtgcagactggcaacaaccaccatgtagccatcttcgaggatgccgacggcaagttgcaagaacacatcgtttcctactacgaggccatggcccgcgtttcacaaggggaacccgtcattgactacaattacaatgtagaattaggctggcgcttccgcttcactatgaagcagaacgaatatttcgtattcccgaccgacgaattcaatcctgtagaagtggatcttactaatccggccaactatgcgcttatcagtcctcacctgttccgagtacaaaaattgtcaaccaagaactatatgtttcgccatcacttggaaacatcagtagaagataagaaggaacttcgtgaaatgacgtggaaaagaatcactaatatagagaaacttcgtaacataataaaagttcgcatcaaccacattggtcaaatcgtagcagtaggagaatactaa

SEQ ID NO: 146 - DNA, 3783 bp, Unknown
  OMNI nuclease sequence
atgaaaattttaggcctcgacttgggcataggctcagtgggttgggctcttattgagaccgacgattcgcgcaatcccattcgcatcatagatatgggctgccgcatcatacctgtttctcctgatgaaacaaaaaactttgaaaaaggcagcgcagaaaccatcaacggcaagcgcacattcatgcgctcagcccgcaaacgcaactaccgatacaagatgcgtcgctctctactcaaagccactctctcggcattagggatgatcgaccagaagtcggaggttgctctgcgcagtctctctccgatgcagttgtggcagctgagagccgacgccgccacccccggcaagcagatcacccttgcggagcttggccgggtgctcatgcaccttaaccagaagcgcggctaccgccatgccaaaaccgatggtaatgattccaagcagacccagtatgtgcagggtgtcaaccgtaattatgccgacatcaaagatctcggcatgaccataggtcaataccaatacagcaagctgaaggagtcggagacccacacagccaaagggtgcagttttgtgatgcaccagatcagggataccgtgtatccccgacaggcctatatggaagagtttgacactatcatgcaggtccaggcccggtattatcccgcgattctcaccgacgaagtgatagctcgcctgcgcgacataatattcttccagcgtccgctcaagtcgtgcaagcatctggtgtcgatgtgtgagtttgagagccatgtcgtgcataaaaaggccgatggctccgcagtgacagtaggcccgaaggtggctccacgcacctcacccatagcccaggccacacgtctttatgaagccatcaacaatatcaccatagtcaattcggccaatcgtggaaataaagatgtgaagctctatgacgaggctgatttcttcaacggcgtggtgccggtggctcttcgcaaaaaagactatgtttaccgcctgaacgcagaggagcgccaacgcatcttcgactatctcaacaccaacgaaaagctcaccgccaccaccctgctcaagctgctcgggctcaaaaagagcgacggctttgtgcccgacaaggccataggccgaggcatcaagggcaatgacacttatgtcaggatagcatcggcgctcggcgattatcccggcaaagaggagctcctgaagtttgatctcgacattgtcgactcgggtgttgtcaacgccgatagcggagagatactcagcattgtgtcggccgatgtgataaaacaaccgctctaccgactgtggcatctgctctattcagtttccgacaaggatgagcttgccggggcgctcggcaagcagtttggcatcaccgatcctgaagtcgtagaccgcctgtgtgccatagatttcgtcacccccggtttcagcaatcgctcggccaagttcatgcgcaagctcctgccgcgcctgatggacggtatcacctatgccgatgccgccggcgccatcggggtcaaccactccggcagcatcacctcggccgacaatgcgcagcgcccccttgatgaccgcctcaagcttttggaaaaaaatagcctgcggcagccgttggtcgaaaagattctcaatcagatgatcaatgtggtcaacgcccttgtcgagcggtatggtgcgatcgacgaagcgcgggtcgagctggcccgtcagctcaagcagagcagcgaggaaagggtccgcgccacccagtcgatatctaaaaacgagaaggaaaatgccgatatcgaagccaagatcagagaatttggcatcagaccgtcgcgtagccgcatccagaaatacaagatgtgggaggagagcggaaaggtatgcatgtattgcggcattgaagtaaaagacaaggaatttcttgagagccacgatgccgaggtggagcatatcatcccgcgctcgctctatttcgacgacagctttgccaacaaaacctgcgcctgccataagtgtaaccatgataaaggcaaccgcaccgcctacgactatatgtcgagcctcggcggcgataaatttgccgcttacgagcagcgtgtcgacaatctctatgccgatggcaagatctcgcgccgcaagcactcatatctgctgatgaagcagagcgagatccccaccgacttcatcgagcgcgacctcaggcagagtcagtatatagcccgcaaggcgcttgagatccttcgcggcaccatccgcaatgtgtgggcatcgtcgggtgccgtgaccggttttttccgccacgcctggggctacgacaatattctccacgatctcaatgtcgacaagtatcaacttgccggcctggtagaaaacgaggagtatgaacatcgcggtcagaagcatgtccgtgcccgcatcaagggttggaccaagcgtcttgaccatcgccatcatgccattgatgccctcaccatagcgctcaccactcagggctatgtgcagcggctcaataatctttcatcccagcatggcaatctgtttgacgatctgactcaggagaatgttgagctgcgagacaactcctcgttgctcaccaagtgggctgctacccgacctcatttcacggttgaggatgtggcgtcgagagtgtctgagatagccatatcgctcaagcggggtgtcagacttgccaccccggccaaacgctacatacgccgcggaggtaagcgcgtcctgagtcagacgggcatcgtagttccgcgcggctctctccatgaagaatccatatatggccgcatcagggtgtatgatggcgccaaggcctataaggatgcgtttcagaatccgcaccttgtggtcaacaacgaggtgcgcgaagagatcgagcgccgcattgccgatgccggcaatgatgtggcaaaagcgctcaaggctctcaagaaatcaccctttacagtggtgataaatggcgagcagcatactcttgacacaatcccttgctatcgcgaagagatagtgctccgctacaaagtggacggactaaaggctaccgatgtcaagtatatcgtcgacaaagctgtgcgcgaggcagtggctgagcgctacgatgagtgtggcggcaatcagaagctcttccaaaacagcgtgaatgctgatcctatatgcctcaaaggctcgccgatgcctatcaagagtgtacgatgcatgacaggtcttaatgcgggctctctcgccggtgtgcgcaaggatggcagtggcaagatcataggcttggcaaagaccggcgacaatcaccatgttgcattctaccgcgatgagaatggcaaggagtgctctatgatcacatcaaggtggggcgccatacggcgcaagctcaatggcatcccggccgtggttaccgatcctgcggcagcctgggtgcgccttgagtatatagccgacgaggctgtggcagccgagatagcagcatcgttgcctatgccgggatggcagtttatccaaagcatgaggcgcaacgatatgtttgttctcggcatgggcgacgaggcatttgccgacgccgtggccgcaggcgatcaatcgaccctcgccagacatctctaccgtgtgcaaacgatatcaaatagtgattatcgttttagaggccatacagagaccacggtagatgaatctaatgaggcaaaggttatgaaaagtgtcctaaggatacagtcgtcaggtgcgcttgccgcgctcactccccgcaaggtgaaggtgtcgcttaccggagagatcatccctctgtaa

SEQ ID NO: 147 - DNA, 3771 bp, Unknown
  OMNI nuclease sequence
atgaaagttcttggacttgacctcgggccgacctctatcggctgggcgataatcgaaatagatgacaaagacaaccctgtctcaatcctgggcatgggcagccgcataatcccgtacggtgttgacactgcctctgacgacttttccagagggaaaggcgaaagcccttgttctgaacgaacccgttaccgccagatgagacgcaacatcgaccgattccagctgcaccgtcaacaactaaaaagcctattgctcggattaggcataatgaagactgacaccatcactccggccgccaatccattggacacatggaaattgagagcggacgccgccacgcccggaatcaaactttcgttggaacagcttgcctccgtacttctccacatcaatcacaggcgaggatacaaacacgccaaatcagatattggcgattccaaacagaccgattatgtctccaggataaatgaccgctatgcagggattaagcaatccgggaaaacagtcggccagtatttctacgacaggctcaaggagtccgaggccatcaatgacaacggaaagaagtcatacacctatcgtatcaaaggaaaggtctgccctcggaaggcatacgaagaggagacagacagaatccttgcggtccagagcgaattttacccggagatacttacagaaggcaatcggcaggcaatcaagcagactatcttctatcagagaccgctgaaatcctgcaagaatctcgtatctttctgccagtttgaacggcatgaatttctcaataaatatggagagaaggtagaaaacggtccaaaggtaactcccaggtcatcaccgctggctcaaatctgccgcatatatgaggccatcaacaatatcaggctcgtcaatgcccggcgacaatgccagaaaacggattgcacgtcttccattttcaatggtccggcctccactacgagagaggtccgcaaactgatgcctgaataccgttttaacgaagaagaatacgaacgtatttttgattttctcaatacccatgagaaaatgaccgagaaagacctgtttaaattgctgggtctcgctgctgatgacggattcaagtccgacaaggccctcggcaaagggatacagggcaatactacccgctggcagattgcaaacgcccttggcgaccaccccgacaaggagaaactgctgcgttttgaaatcgttgaagagcatccggcgtccggtccggacattgcggcctccaccggcgaaggtcttccacgcatctatccacagtatatacaccagccgctctatatgctgtggcatacgctctattctatcaaagacaaggaggagctgttcaaggtgctttcggcgaaattcgggattaacgacactccgaccctcaaccgactatacgctcttgatttcgtccaagccggctatgccaacaaatctgcaaaatttatacgcaaactgctgccgctgctcaaacgtggcatgatgtatagcaaagcctgcgccatggccggcgtgaaccacagcaacagcatgactcgggccgaaaacgaagaacgggagctgcatccaaagcttgcccagctgcgcaaaggggaactcagacagcccgtagtggaaaaaatcctcaaccagaccatcaatgtggtcaatgctatcattgatgagttcggagtaattgacgaagtccgcatcgaactcgccagggaactaaaaaaggacaaagaggggcgtgaaaaaatggcccgagacatcgccaggaatgaacgagaaaacagggctctggcagatgaaataagcggtctggaaatacagccctcacgtcggcgcatccagaaaatgaaaatgctcaaagagaccggcaatcgatgcatgtattgcggcaaacccgtgacaccgtatcagtttatcgaaggccatggttatgacatagagcatataatcccacgttccaggctgtttgatgacagtttcgcaaataaagtctgcgcatgcagggagtgcaatgctgccaaaggggctcacacagcctttgacttcatgaaatcaagaagcgagcaggatctcaattcgtatcttgaccgcgtggatgaattgtacagggccaataaaatatccaggaccaaacgtgaccggctgctgatgtctgcatccgacatacccgacgatttcatccagagagatttgcgtgagacccaatacataacccggaagtctatggagatactttcagcagccatacgcaatgtccatgcttcatctggaatggtaacggactttttcaggcatgcctggggatatgacaccatactccacgacatcaatctcccacgatatgaggctgcaggtctgactgagaatgtggaataccagtcccacggacaaaaacacatggcacacagaatcagaggctggtcaaaacgaaaggaccacaggcatcatgcacttgacgctttggtcgtggctctgacccgtcagggatatatacagcgtcttaacacccttaatgctctatctgacaaaagtgacgacggtgaaaaatggagcagccttgacagatgggctgcggaaaggccgcatatcgggcgtcagaaagtgatagaggcattggagaaggtggccgtctcgtataaaccgggcaaaaagctcactactccaggcaaacgatatgtccgcaaggatgggagacggacatgtgtccagacgggtgtgacaataccacgagctcctttacacaaggagaccgtttacggccgaataaaaattgatgacggagaaaaggacttgaaacacgcgctccagaacatcaaccttataaaggacgacggcatccgtcagcagcttgctatgcggctgcaagaaaatgacgggaacatccccttgaccataaaggctttgaagaaaaacaatctggaagtcggtggccgttcagtggaaaacgtaagatgttatcgcgaagagatagtcgtccgataccctcttgaatccatccgatataaagacctgcgctacattgtggacccacatatccgtgagattgtgcagacccggttcaccgaagtcggaaatgcagataaagactttgtaaaaagcctcaccgaacgtccgctgtactccgacaagaactgccgacatcaaatcagggccatccggctaatctcaggcttaaacccgtcgacgcttgccggcgtgcgcagagaccaatcaggcgatacaatcggatatgcccagacgcgcaacaaccaccatctggctttatacaggaatcccgacggcagtattgtggaatctgtggtcagcttctgggactgcatcaaacgaaaacaggccggactaccgccgataatcaagaatcccgccgaagcctgggacacagtcattgccaacagtgaatctgcccgtttcgcaggtattgcagacacattacctcctgatggcagtgaatttatcatgtcactccaacgcaacgaaatggtcgtgctcggcatgtcggacgatgaatggaacgacgctgtggcttccaatgatttccgcaccatcaaccgccatctttaccgggtttggaagctaagttctggaaagtactgttttaaattccacaccaacacctctgcggccatcgaggacggggacagggaaatcaggcaattctatgtgacatcactgtcttctttaagggcactacatcctcggaaaatcacaatatccatactcggcaatcctgacagtctctccgatgataaagaaagtcctatgctttag

SEQ ID NO: 148 - DNA, 4125 bp, Unknown
  OMNI nuclease sequence
atgaaacaaaagattttaggccttgatttaggcaccaattctattggaattagcgtaagaaacactcagaagtcaggaaaaatcactgaccaattagagtatttcagttcttttatttttccttcgggtgtaggtataggtaaaagtggcgaattttcctatgccgctcaaagaacagaagcccgtagtacaagacgactatatcagtctcgccgatatagaatctgggcgacattggaagtgttgacggatctgggattttgccctttgagtaaggaagatcttcatgcttggtgtacttatagcaagaaagaaaatttattccgcgaataccctgctgacgctaaagagtttgaacagtgggttcgtttggattttgataatgatggagtgcccgaatacaccagcccataccaactgcgtgcagaattgatggagcgtcagttcgattttgggaatcctttggagcgatataaatttggtcgtgctttataccatatagcgcagcgtcgtgggttcaagagtagtaagggagaaactttggagtcacaagaggatactgctaacggagttgaggtggatgtggcttctgagttgaaaaaatcggaggaaaagaaagccaagggtttgaaggagtatatggggcaaaacaactgcccgactgtaggatgtgcgttctatagaatggagcaggaaggcttgagggttcgcgccaatgaacagatgcaggctgtccgttcgatgtacgaagaggagattgatagtatatttacataccaaaatggcttgtcaaaagacagcgaactgtatcgcagaataatgagtcataaaaaaggtgaaggttgtatattttacaaacgccctttgcgttcgcagaaaggtactgtaggcaaatgtactttggaaaagaataaatccagatgcccaattagtcgtcctgaattcgagcagtttagagcgtggtctatcattaacaacttgcgttacaaaacgaaggatgattccggaaagccatcccgtgaattagaattaagcattcggcaacaattgtacgaagagaagtttgttagagcatccaactttaagatggaagacattcttaagtggctgaagaagaaaaactcagatgtagccgaactgaactatgaagataaaacatccgtcatgggtagtcctgtttgtgcaaaactgaaggacattttgggtgatgattggcagcaccaaactattgaaggatatgattatgtagaactgtggcatgtttgtttccaagccgacgaggcggagaatgtcaaagatttttccattacgcatctgcacgcagacgaagtgttgtgtgcaaagatgataaaattatggggagccattcgcccggattatgcatccctatcactgaaagcaatttgtaacattttacgaatgttgcaagaaggatatatctattcggatgcggtggttcttgctaaactgcctgatgtatttggtgataattgggaaaaagtcaaagaacctatccttaatgaatggatcagtattcaatcaacaattgagcatagccgtttagtggccaagattacaaataatcttattgcggagtataaagtactccctgcagaagaccaatttgcgtttcgcaatacggactatctgcttgatgaatcggacaaaaaacaaattcaaaaagccatcatctccaacttgtctccaaagaggtggaagcaactcaccaagcaagagcaaatagatctgcaagagaatgttgctaatgcctatcagcaattcttcaagagtcaggaaagaaattacctgcctatacaacatctaactgatgcactcagtagtctaattatagacaattttggagactttgttgccgataactacaaatccaaattagaacaaggaagggatatattctatcacccatccatcgtgagtatctatgcaccacaagaacccagagaggtagtaacgaatcgaggaattcgccaaatgaagctattgggaagtcctgccacaaatgtattccgtaatccggtagtcatgcgtgtactctatcagttgcgaaccacactcaaccaactcattgcagatggtattattgatgaatcggacaccagtgtagtagtagagactgcgcgtgagttcaacgatgccaatatgcgtgccgccattgctcaataccagcgagacagagaaaaagaaaatgaaaagtataagagtgaattggcgtcatattatcccgatagaaatatcagttccaccgatattgataaggtgcgtatatggcatgagcaaggcgagcgttgcatctatacgggtgatattatcagtttgagtaatctgcttaatgatgattcttttgagatagagcataccttgccacgaagtatcagttttgacgattctttggcgaacaagaccatttgttctgcacactacaatcgatatgtaaagaagaatcttttcccatccgaattacctgaggtagattatcaggcaatccttactcgtatagaaccatggcaagaaaagattcgttctatcaaggcacaaattactctgcgtaaaaacaaaagcaaaagtgctactactccagatatgaaaaataaagccatcaaagaaagacatattttggagatggaactgaggtattggcaagacaaagtgtcaaggtttaccatcaaaaaagacgattggaatcccgggtttagaagcaatcaattgaatgacacacgcaccataaccaaatatgcttaccatttcttgagaagcgtttttggcgaggtaacagtacagcggggtgagatgacggccaatttccgtaaggcattgggtattcagagtatggatgagcgcaaggaccgtggcaaacattctcaccacgcagttgatgcaaccatgttgacactgattccaggaaacaccaaacgagaccaacttttggacttgttttatcaaagagaagaactacaacgccgtatggagtcagacgcttcagtcaaggatgccttggatgaagtgagcaaacagtatacacaaatactaaagtcttgcgatatttgtggtgtagatgaagttacagaatacatccaaaaccacatccttattcatcattgcaccaaagaccaaacactaacaccatccaaacgccgtatgcgaacaagaggtaaagtggtggtaaaagatggtagcgaacgatgggtaatgggtaatagtatccgcgcccaactgcacaaaggatcctattttggcgccatccaatcgggtgaaacaaatgcaaatggagaaaaagagatactgatggttgcgagagttcctattgatgcattcaaatccaaggacgatatagagaagattgttgactcgcgcgtgcgcaccagtgtactacatgttgtaaataaacgaatgtcagaaggaatgtcgtttgccgatgctttgaaacaacccatttggatgcaggacaataatggacaagaaatcaagatggacaagtatggtcgtcgccttcaacccattcgtcatgtccgttgtaaggtggcagcaggtatgggattcttgacaaaagacaaagcacttcctattcgcgaacaagtatatacctccaagaatacatataaaaactatgtatatgctcaaaacgatggtaactatctgtgcttgttatatcaaggagagtacaaagggaagttggttcgtaaaatgcagtttgttaactacttcactattgctcaattgggtatcaggaatatacaagaactaatgcaactcccatcgtatcaaaccatagaggatggcaagaaaacctatacactgacagccataatgaaaacgggaactcatgtgctgatgtggaaggactacccggaggagttaagagatatggatcctgagcagttgtataagcgcctttattgggtgtataaattcaataactctggttcagattatgtctttgttcaaaatcatttagaggcacgctccaatgatcaaattcccaaggatgaaaccactttcattcccgaacaatatcaagcaagattaaaattgaatgccaatgcatgtaatttcttgattgaaggagtgaacttccgtatcacagaaacgggtatagaattcctatga

SEQ ID NO: 149 - DNA, 3630 bp, Unknown
  OMNI nuclease sequence
atgaaaagaattttaggtcttgatactggaacaaacagtcttggttgggctgttgttgaccgctttgatgacggcaagtataatcttgtgcgtagaggaacgctgatttttcaagaaggcgttaagatagaaaaaggtatagaatcaagtaaagctgcagaacggacagagtataggtcatcgcgccgtcattatttccgtcgccgtttgcgtaagattgaaacattgaaggtcttgattaaatatcggctttgtccggctttgacggaagaagaacttaaactctggcatctgaaaaagaagtatcccatgaatgaggcttttctgcaatggcagcgcaccaatgacaataccgatgtcaatccatatcattgcaggcacatttttttacatgaaaaactaaatcttgaaaaagaaagtgatcgtttcattttggggcgggcattttaccatttggcccagcgcaggggtttcttgagcaatcgtctggaccagacaaaagaaaacgacgatggtatggtcaaaacaagcatttcacaacttggcaaagatatgcaggaggctggatgcgagtatttgggtgattacttttacaaattatatcaggaaaaaagtaacactatacgcatacgtaaaaattatacatcccgtaaagaccattatattaaggagttcaatgctatttgtgattgccaaaacttgcctgatgacatgcgtaaagccttatacgatgccttgtatttccagcgtccgctcaagtcgcagcgttacagtgtgggtaaatgtacctttgaaaaaaataaaccacgctgtgctgtgtcacatccgttgtatgaagaatttcgcaaactgtcatttattaataatataagagttagagtagatttttttggaaaaggagaagaacgcccactaaatgaggaagaaatcaagaagatagacaaattgttttaccgcaagagcaaaaatttcgattttgaagacattgcgaaggctattgctggaaaagacaattaccaatggctcaaggctgagggtgataaacagtacaagttcaattacagaatggatcagggtgtgagtggttgtcctactcagactgaattgaaagatttgttcggcgatgattggatgaacggcatcgccgaacggtacacctgtaacaagcatcaggatggcacgccaaaaacacaggaagagatggcaaccgatatatggaatgtgttattctcttttgatgatgatggcaaagtaaaagaatttggacgtaaaaaattacagatgtcggaagaagaggcagaaaagtttgcgaatatcaaattgcagcaaggctatgcctctttgagtcttaaggctattcacaagattttacctttcctccggcagggagatatttatacctacgctgttttcttggcaaaagtacccgacatcgtaggtcatggtatatgggagagagacaaggatgaaatcatagcagacttgaaatataatatagatttggctatcaaggaacatcggcgtattgatgaggctgtcaggggttatctggaaaataactttgagttacgtccgggcatccttgatgatttgtatcatccgtcaataaatgatgtctatgaggatgccaagcctaacaaggacggtatactacaattagggtctccaaagaccaatgctgtgcgcaacccgatggctatgcgatctctgcatcaggtaagaaaggttgttaatcagctccttttggaaggtgtcattgatcgcaatacggaagtccatatagaatatgcccgtgatttgaatgatgctaacatgcgacaggctatcagcagttaccaaggtgaccaaaagaatgaacacaataaggctgcaaaagaaatccgaaaattatacaacgaagaaactggtatggatattgaaccgaccgatgacgatatccttaaattccagttgtggaatgaacaggagcacaaatgtatctatacaggagccacgataggtattgcggattttgttggagcagattctaaatttgatattgaacataccattccacagagtgtaggtggtgacagcactcggatgaatctgaccctctgcgatgccaagtttaaccgcgaggtgaaaaaggcccaactgccatcccagttgtctgattatgacaatattatggaacatatcaagccatggaaggacaagattgaggatttgactcggcaaataaaaaaaatccgtacttacagtggcatggataaaagggaaaaggatagcaaaatccaaaagcgtaaccgcctgaaaatagaattggattattggaaaggcaaatacgaacgttttacaatgaaggatgtaccagaaggctttgctcgtcggcaaggagctggtattggactgatttcaaaatacgcaggactctacttgaggagtctgttccatgacccggctaatcctgacaaacgtcagatatacatcgttaagggtccgatgacggcagaattccgcaagatgtggggtgtgcaagaggagtacgagaaaaaatcgcgcgacaaccatgcccaccattgtattgatgcaatcgtcattgcttgtattggtaaggcggaatacgaccgtctggctttttattatacacaggtagaaaaaggtgttaagccggaatttgagaaaccatggaacacctttactcaggatgtcaagaaaatagctgacgaactacttgtcgtacacgatacgcccgacaatatgccgaagcatacccgtaagagggttcgcataagtggcaggggtataaagatggctcaaggcgacagtgcgagaggcaaactgcatgaggaaacttattatggagccataaagaaagatgatgaaatcaattatgtttcaaggcgttccctagaaaaattaaaggaaactgatgtagacaatattgtggatgatgttgttcgccaaaaaatcaaggatgccgtaagtagcaaaggtttcaaggaagcgataaaaggccctatattcatgaatgaggagaagggtatcctaattaagaaagtgcgttgctatgctaagatggtcaagaatcctctaattattcgtcagcagcgtgatgtcagtgcaaaagattacaaacaacaattctatgtcacaactgataccaactactgcatggctatatatgaaggtatgctgaatggcaaattaaagaggagttatgaaatagttgatatgattgaagcgtctaagtattataaagaaagtaacgataccaaaaatgtgtatcctatagttcctgaaaatagaaaagaattaaaatataaatgcatggtaaaaacaggaactcaggtaatcttactacaaaattcagaagagaaactggaccttgatgatgaaaaatccctttcaaagcgtttataccatgtggcagggatgtttaaagatggccggttagtcttaagaagtaataaggaagctcgtgaagcgggaaaattatctaaagaaacccaggctggagtctataaggaatcagatgattatcgttcgcaaattagaattagcctttctgattttcatgctttaattgaaggatacgatttcaaatttactccactgggagatatcaaattaataaatcatgcttaa

SEQ ID NO: 150 - DNA, 3615 bp, Unknown
  OMNI nuclease sequence
atggaaagaattctaggtattgataccggtacaaacagtcttggttgggctatcgttgataaggatgataatgaatatcatctcgttgctaaaggtaccaacatattttctgagggtgtaaagatcgaaaagggaatagagtcgtcgaaggcttcagaacgaactggttatcgctctgtgagaaagcattattggcgaaggaaaatcaggaagatcagacttcttaccatattgtctgaaaacaatctttgtcctcctttgaagaaagagcaattgagattgtggcgcctaaaaaaggtttaccccgttgacgatgattttatggggtggcagcgtaccgaggataaagccaatgttaatccatataagtttagatatatctgcctgacagagaaactggatctgactaatgttactcagcgctatattttaggtcgtgctttatatcatttgaatcagcgtcgaggttttttaagtaatcgaaaagactctaccaaggaatcggaaggagcagtaaaggaaggtattagttcgctgtcagatgacatgaaggcttctgggtgtgagtatctgggtgaatatttctatcagctttatcagaaaggagagaagataaggaaccactatacggctcgaaaggagcattatctgaaagaattccatgctatctgcgagaaacaggaacttgatgcgttttttgtcgagaagttagaaaaggctatttttgatcaacgcccattgaaatcgcaaaagggacaagttggcacatgtacatttgagaaaggtaaaccccgttgcccgtcctctcatccgctgtatgaagacttcaggatgtattctttcctaaacaatataaaggtgcaggtaaatacactttacgagaagggtgagaggtatctgacagcggaggagaaacgccaaattatacctctttttaagcgtaagtcaaaacgtacattcccatttgaagatatagccaagaaactggccggtaagaataactattgttactacaaggatgaggaggaaaaaccttataggtttaactatcagatggatactcaggtgtctggtagtccggtgaatgctcagttggaggaactttttggtgaggattggctttctggcgtatgtgaagtttatactttagccaaagacaagactcgattccaaattatgaatgatgtttggcatgcattgttcttttatgatgatgaagataaactaagagaatttgcgcagaatcgtttacaactggatgaagcgcaggcagtaaagtttagtaagatttctgtccctaatgattatgcagcccttagtttgaaagctattcgcaagatattgccttatatgcgtcattatggtttgatctattctgaagcggtatttttggcaaatttggtagatgtgcttcctggatatgtatggggcgtaaaagaaatgcgtgaagctgccatagagaatgtgattgatgtgatgcactcatacgataaaaagaatattgatggtatcacactagaggcctgtgttaagggtttcttgaaggagcggtatcaggtggatgatgatacacttaagaaactctatcatccttctatgctcgatctttatccccgacagcgtgctaatcaggatggcatctatcagcttggttcgccccgtatcagcagtgttaagaatccgatggcgatgcattctctgttcaggttgcgtaaagtagtgaatctgatgctcaaaaagggctatatcactccggaaacaaagattcatattgaattctctcgcgatttgaatgatgccaacatgcgctgggccatccaaacctggcagcgcgaaaatgagaaggatagagagcgttgccgcaaagagatagaaaaatatgttgcgacaccaacagaaaaagatattctgaaatatcagctatgggaagagcaaaatcataagtgcctttatactggcgaggaaatatcattgacagattttctgggtaaagatcccagatatgacatagaacatacgattcctcgaagtgctggaggtgatagcacaaagatgaatcttacactttgtagcaatagttataatcgtgatattaagaagaccaagttgccaagccagttggctgcacatgaagagatattggagcgtattaaggcctggaaagaaaaatatgaagaactggatcatatttttaggaagttgaaaggaagtagtgcatccactaaggaggaaaaagataggataataagaaagaaaaatctgttgaaactgcagcgagattactggcgaggtaaatatgagcgtttcacaatgaccgaagtgcctgaaggtttttcacgccgacagggtacagacattagtgtgatatctcgctatgctcgcatgtatctcaagtcggtattcaagcaggtatatatcgttaaaggtatagccacatctgatttcagaaagctgtggggcattcaggaggattatgccaggaaagagcgtgtaaaccatgttcatcactgcatcgatgccattacgattgcatgtatcggtaaggctgagtatgataaactggcgcaatactatcacgaaaccgatgaatacaaattgggcaaaggcaagaaacctgattttgagaagccttggccttcgtttgttctggatatccgacatattcaggacgagctgttgattgcgcactattcaaaagataatctgcccaagcaggccaagcgatatgtaagagatagtaagggtggcaaaatcctgactcagggtgatactgcccgtgcctccttgcataatgaaacctattacggagcgattgaggttgatggcgatgtgaaatatgtagtgcgcaagagtcttgactcgttggatgagaaagacatcaagaatatagtggatgccgaggtaagatcaaaggttgaaaaagctgttcagtcttctggctcgttaaaaaaggctgtggagaaaaccatttggatgaacgaggaaaagcagatccccatcaacaaggttcgtgtgtttgcaggatctgtaacccgtcccattcatattcgccagcagcgcgatcagtcaaagcatgaatacaagcgtcagtaccatgttcaaaatgaccgtaactatatgatggccatctatgtgggacaggataaaaaaggaaaagaaaagcgtgagtttgagctggtaaataatataacagcagttaatttctatcgcagaagcaatgataaggttccaacagacaatcagttggttcctcagtttagtaagagtggctatgagttgcgatacaaattgaagataggaaccatggtgctgctatatgaaaatagtccagaagaaatatgggatctcgatagggccaatcttcagaagagactgtataaggtaacgggattatcgtcaatggttatccaggggaaatatgaatttggtacaattgaaatgatacatcatcaaaatgccaaacctagtacggaaataaagaaagtaaatggagagtttaagcatgacgaggagtttcgaccgggtataaaaatgttacattctcaaataaaagcccttgttcaaggcgtagattttgaaataaacgatttaggtgagataaggaggttgatatga

SEQ ID NO: 151 - DNA, 4470 bp, Unknown
  OMNI nuclease sequence
atggcaacacgtaaaatcctcggcttggacttaggcaccaacagcatcggctgggcagtagttagtcaaaatatggatagccggtccatcgcagcggcaggcagtcgcattatcccgatggatgccgcattgatgggcgatttcgaaagcggaaatagtgtctcacaaacagccaatcgtactgcggcacgaggcacccgacgtctgtatgagcgcagggctctgcgtcgtgaacgtctctgtagggtgctgtcaatcttaggtttccttcctccgcactatacgcaggaactgaatcgctatggcaaactgaacaaaggagccgagccaaagttagcatggacggttgaaggcatcaagccgacattcttattccaaccgtcttttgaggaaatgatgcgtgattttgctgttgcgcaacctcaattagccgctaacgggaaaaagataccttacgattggacgatttattatctccgtaaaaaagccctcacacagcctgttacaaaacaggaacttgcttggatactcctgcaattcaatcaaaaacgtggttataaccaggcacgtggagaggaagaagagacaaaaacaaacgaaaagaaagaactaatcaccgctaaggtggtcgaagtgcgagatacaggtgaggtttccaaaggacgcacgtggtatgaggtggtgcttgaaaccggagacatctacaaacgtcaaagtgcttacccgctggattgggttggcaaaaccaaagattttatagttaccaccaaattgaatgaagacggttcggaagccattgacaaagaaggaaggcctaaacgtagtttcagtgccccgcaggaggatgactgggggctgcgtaaaatcaaaacggagcatgatatcgctcaaagcggaaagaccgtgggcgagtttatttatgatgcgctcttgcataaccccgaccaaaagatagtagggcagttggtgcgtgtggtggacaggaaactctacaaggaggaactgcgccgtatcttggacacgcaaaagcaattcattcccgaactgcaagatcctgacctgtacaggcaatgcattgaagccatctatccgcagaacgaagcctatcgcaatagtattgccaacaaggattttacctatcttctcttgcaagatgttcttttctaccaacgtccgctgaagagcaagaaatcgcttatcaacgaatgtccctacgaataccacgtttaccaaaccaagaatggagactggaaacggcaatatctcaagtgcatatccaagtctcatcctctctatgaggagttccgtttgtggcagttcgccgagaacctgcatatctacaaaatagatgcaaatggcattggcaaatcggattgcacggcagactatatccaggacaaagccgctctggtcaagtggttacttacacaaaaagagattacggaaaaatcgatattgtcgaaatttgccggtaagaaagcaaaagacttgtcatggaactatgtgagcgacaagaaatatccttctgctcctgttacagcgacgcttacggctattatagcagaagtgggtggcaccataaacaatgaggaactacaccacatctggcatatcctctattccgtctctgataaggaacaactcacacaagccctcgcgcactatgccgaaaagcataatctgtcttctgtctttgtcgagaaactgagcaaacagaagccttttgcagccgactatggcgcatatagtgagaaagccgtccgccgattgctcagcctgatgcgctgtggagagtattggaacgaagagaatatagacccgcagacgaaacagcgcattgagcatatcctgacaggagaggtgaatgatgctatcagcgacagggtgcgcgagaaactgaaagacctgaataatatatcggactttcaaggacttcccctgtggctggcagagtatgtggtctatgatgtccgcaagaacgacaccaagtgggaaacgcccgaggacattgacaaatatcttcaatccttccgccttcactcgctcaacaacccgattgtagagcaggtggtgatggagactctgcgcacggtgcgtgatatttggaagcaggaggggcatattgatgagatacacatcgagatggggcgcgaactcaaacagaatgccgagcagcgcaagaataccctcacacgccagcaggacaacgaaaaagccaatctccgtgccaaactcttgttgcaggagtttatgaaccccgatgcaggcatggatggagtgcgtgcatactcgccaagtcagttggaattgttccgcatctatgaagacggtgtcctcaataattccaatgcgacaagagacgatgatattcagcgtattatcaaagacctgtccgaactcaaacaaccatcggctgcagatgtccgcaagtatcgcctgtggcttgaccagaaatatatttcgccatacacagggcaacccattccgttggctaaactctttacgtctgcctatcagattgaacacgtcattccgcagtcccgtttctttgacgactcgatgtccaacaaggtcatctgcgaagccgaagttaatgcccgcaaagaccgtatgttggcgcacgagttcatcacaaaatgcggtggcgagaaaatcacactatcgggtggcagagtcgtaacagtcttaaccacacaagcgtacgaggacttggtgcgcgatacctacaaaaccaatccacgcaagcaggaaaaactgatgttggacgacattcccgaaaagttcatcgcccgccagatgaacgacagccgctatatcagtcgtcttatgctcggattgctcagcaatatcgtccgcgaaaaaaatgccaaaggcgagtacgaacccgagtcaacaagcaagaatgtcattgcttgcaatggctctactaccacccgcctgaagaaagactggggcatcaacgatgtctggaatcgcattatcctgccgcgcttcgagcgtctcaatcaactccaaaacaccaccatcttcactaccaagacagccaacgggcatactatccccaatatgccgttggagttgagtaagaactttgagaagaaacgtatcgaccaccgtcatcacgctatggatgctatcgtcattgcgttcaccacccgcaaccacgtcaatctcctcagcaacgaggcggctctcgagaaggacgagaacgcacgttacgacttgcagatgcaactgcgcaaacgggaaacatggacttccccaaatggcaagtcgcacaccaaattcaccgactttatcgcaccatacgagggcttccaacaggacgtgcaaaccacgcttgagaacatcattgtcagtttcaagcagaacttgcgcatcatcaacaagagcaacaaccataccgttcattttgaagatggcaagaaaaagagtgtcaagcagacaaagggcgacaactgggctatccgcaaatccctgcataaagcaacagtctttggcaaagtgaacctccgtttccgcaagacgactccgctcaagtatgccttaacccacctcaacgacattgtggacaaagacttgcgccttaaattgcgcgagttagtcgctcaaggctatgacgagaaacgtctcaagaagtactttgcggagaataaagacgtttggtcggacattaacctgcagaaaatcgaaatctactactataccaacgacacccccgataactactatgccacccgcacagccttaggcgattggttggacgaaaagagtattcgggaaaaagtaaccgacaccggcatacaaaagatactgttggcacacctctcgcagtgcaacggcgaccccaaagaggcgttctctgcggatggcattgagaaaatgaaccaaaatatcgctcaactcaatggcggagtgccgcacaagcctatctacaaagtgcgtaaatacgagaaagcagacaagtttgctgtaggtgaaatcggctctaaatcaaagaaatttgtggaagccgacaagggaaccaacctgttctttgctatctatgcaactaccaacaccgatggcaaagaggtgcgctcttatgcaaccattcctctgaaagccgtcattgactgccaaaaacggggcaagaaagagtggaaacccttgctcgaccaatgggtgcataacaataatttagtacctgccaacgccacactaaaatatattctctccccgggcgacttggtctatttgccccaagacggcactgccacgattgataaaacccgtatctataaaatggtgtcaagcacaggcaatcaatgtttttgtgtcccgtgcagtatggcttcgccaattatcaataaagtagagtttagtccattaaataaaatggaacgtgccatcaccggtgagatgataaaagaaacatgcgtccccattcgcgttgaccgtttaggcaacataatttccatcaagccatga

SEQ ID NO: 152 - DNA, 4470 bp, Unknown
  OMNI nuclease sequence
atggcaacacgcaaaatcctcggcttggacctaggcaccaacagcatcggttgggcagtagttaatcaaaatatggacagtcaatccatcgcatcggcaggcagtcgcattatcccgatggatgccgcattgatgggtgattttgaaagcggaaatagtgtctcgcaaactgctaatcgtactgcggcgcgaagcactcgccggttgtttgagcgcagagccttgcgtcgtgagcgtctcaatcgggtgctgtcaatcttaggtctccttcctcctcactatgcacaggaattgaatcgctatggtcaactgaataaaggggtcgaacccaagttggcatggatagttgaaggcactaaaccgacatttttattccaatcatctttcgaggagatgatgcatgattttgccgttgctcaacctcaatgggttgcgaacggaaaaaagataccttatgattggacaatttaccaccttcgtaagaaagcccttacatccccgattacaaaacaggaattagcatggatactcctgcagttcaatcaaaaaagaggctatcatcaggctcgtggagaggaagaagaagcaaaaccgaacgaaaagaaagaattggtaactgccaaagtgttggaagtgcgtgataccggcgaggtctccaaagggcgtacgtggtatgaaattgtgcttgaaacaggagacatctacagacgccaaagtgcttacccgctggattgggttggtaaaaccaaagattttatagttaccaccaaattgaatgaagacggtttggaagccattgacaaagaagggagacccaaacgtagtttcagtgcccctcaggaggatgactgggggctgcgtaaaatcaaaacggagcatgacattgcacaaagtggcaagactgttggcgagtttatttacgattctctccttcaaaatcctgatcagaagattatagggcagttggtgcgtgtagtggatagacaactctacaaggaggaactgcgccgtatcttggacgcgcaaaagcaattcattcccgaactgcaggatcctgacttgtacagacaatgcattgaagccctctatccgcaaaacgaagcctatcgcaatagcattgccaacaaggattttacctatctgcttttgcaagatattattttcttccaacgtccgttgaagagcaaaaagtcgcttatcaacgaatgtccctacgaataccacgtttacaaagccaagaatggagactggaaacggcaatatctcaagtgcatttccaagtctcacccgctctatgaggagttccgtttatggcaattcgtagagaacatgcatatctacaaaacagatgcaaatggcattggcaaatcggattgtacggcagactatatcccagacaaagccgctctggtcaagtggctgcttacacaaaaagaggttacggagaaatcgctcttgtcgaaatttgccggcaagaaagcaaaagacctgtcgtggaactatgtgagcgacaagaaatatcctgctgctcctgttacagcgacacttactgccattatagcagaagcgggtggcactacgaacaatgaggaactacaccacatctggcatatcctctattccgtctctgataaggaacaactgacgcaagcccttatgcattatgcagaaaagcataatctatcccctgtttttgtcgaaaaactaagcaaacagaagccttttgcagccgactatggcgcatatagtgaaaaagccgtccgtcgtttgcttagcctgatgcgttgcggagagtattgggaagagacggacatagacccgcagacgaaacaacgcattgaccatattttgacaggggaagtaaacgagactatcagcgacacggtacgcgagaaactaaaagacatgaatggcatggtcgattttcagggacttcctctatggctggcggaatacgtagtctatgatgtccgcaagaatgacaccaagtgggaaacacccgaggatattgatagatacctgcaatcgttccgcttgcactcactcaacaacccgatcgtggaacaagtggtaatggagactttgcgcacggtgcgtgatatttggaaacaagaggggcatattgatgagatacatatcgagatggggcgcgaactcaagcaaaatgctgagcagcgcaaacagacactttctcgccagtcggataatgaaaaagccaatctgcgtgccagactcttgttgcaagagtttatgaatccggatatgaatatcgagggcatacgtgcctgctcaccaagccaactggagatattccggatatacgaagatggtgtgctgaataatcctgatatagacaaagatgatgatatccaacgtattatcaaagaattgtccgaactgaaacagccctctgcatcagatgtaaaaaagtaccgtctatggttggagcagaagtatatctccccatacacggggcaacccattcccttggctaaactctttacgcctgcctatcagattgagcatgtcatcccgcagtcccgtttctttgatgactcaatgagcaacaaagtcatttgtgaagccgaagttaatgcccgcaaagaccgtatgttggcgcacgagttcatcacaaaatgtggtggtgagaaaattacactatcgggtggcaaagtcgtaacagtcttaaccacacaagcatacgaggacttggtgcgtgatacctacaagtccaatccacgcaagcaggaaaaactgatgttggacgacattcccgaaaagttcatcgcccgccagatgaacgacagccgctatatcagccgtcttatgctcggattgctcagcaatatcgtccgcgaaaaaaatgccaaaggcgagtacgaacccgagtcaacaagcaagaatgtcattgcttgcaatggctctactaccacccgcctgaagaaagactggggtatcaacgatgtttggaaccatatcatcttgccgcgtttcgagcgtctcaatcaaattcaaaacaccaccatcttcactaccacgacagccaacgggcacactatccccaatatgccgctggagttgagtaagaacttcgagaagaaacgtattgaccatcgtcatcacgctatggatgctattgtgattgccttcaccacccgcaatcacgtcaatctcctcagcaatgaggcggctctcgaaaaggacgagaaagcacgttacgacttgcagatgcaactgcgcaaacgggaaacatggacttccccaaatggcaagtcgcacaccaaattcaccgactttatcgcaccatacgagggcttccaacaggacgtgcaaaccacgcttgagaatatcattgtcagtttcaagcagaacttgcgcatcatcaacaagagcaacaaccataccgttcattttgaagatggcaagaaaaagagtgtcaagcagaaaaagggcgacaattgggcgatacgcaaatccctgcacaaggctacggtctttggaaaagtgaacctgcgcttccgcaagacggctccgctcaagtatgccttaacccacctcaacgacattgtggacaaagacttgcgtctcaaactgcgcgagttagttgctcaaggctatgacgagaaacacatcaagaagtacttcgccgagaataaagacgtttgggcagacatcaatccgcaaaagatagaggtgtattattataccaacgacactcctgacaactactatgcaactcgcacagccataggcgattggctggacgaaaagagtatttgggagaaagtaaccgacaccggcatacaaaaaatactgttggcacacctctcgcagtgcaacggcgaccccaaagaggcattctctgcggatggcattgagaaaatgaaccaaaacatcgttgccctcaatggcggagtaccgcacaaacccatctacaaagtgcgtaaatacgagaaagcagacaagttcgctgtcggtgaaattggctctaaatccaagaaattcgtggaaaccgacaagggaaccaacctgttctttgctatctatgcaaccaccaacgctgatggcaaagaggtgcgctcttatgctaccattcctttgaaagccgtcatcgactgccaaaaacggggcaagaaagagtggaaatccttgcttgaccaatgggtgcatgacaataatttagtgcctgccaacgccaccttgaaatatatcatctccccgggagacttggtgtatttgccaaaagaaggcgctgccacgattgataaaacccgtatctataaaatggtgtcaagtacaggcaatcaatgtttttgtgtcccatgcagtatggcttcaccaattatcaacaaaatagagtttagcccattgaataaaatggaacgtgccctcaccggtgagatgattaaggaaacctgcgtccccattcgcgttgaccgtttgggtaacataatctcccttgaaccatga

SEQ ID NO: 153 - DNA, 4077 bp, Unknown
  OMNI nuclease sequence
atggaggaaagcaaatactatttggggctagatatgggaaccagttccgtaggatgggctgtcacagatgcacagtattgtatccttagaaaaaagggaaaggatatgtgggggatacgtgaatttgaacaggcggagtcggcggcagagcgaagatcgcatcgtatcaatcgcaggaggcgacagcgacaggtcgcaagaatcggactcttaaaggattattttgcggatgaaatagagaaggtagataaaaatttttatgtccgaatggaaaatagcaagtattttatggaagataaggatgagcgcttgcaatcgcacaatggaatctttgacgatgatacctttaaggatgaggattattataagctttatccgacgatttttcatttgagagcggcattgctggatatggataataccggacaggcgtttgatgtccgcttggtatatctggcgcttttaaatatgttcaagcaccgggggcattttctgttaaatacagaaagcagtgaatcaggtgatgtacagattagagtacaatatgaagacctgataaggcaggtgaatgaaaaatatggagtggagctggctgctgtgcctgcaaaatctgtcattgcaattattggagacaaagaaattggaaggaaactgaaacatgaaaagctgttagagttatttcgtattaacagaaaaaatagacgagtcagtgaattcctgaaatgtatgtccgggctgagcagtgatgcaaatacgatattgcaaccgggagtagaagaaaaaatacctgtttgttttcatgatttttcatatacggatcagattccagagttaatggaacagttgggtgatgagaaatatgccatcattgaacagatgaaagccatttacgactacgcaatattgacaggcacgatgcaaggctatgaatatttgtcgcttgcaagggttgccgattatgagaaacaccgggcagatctaaagtgcttaaaagaaatttaccgcaaatacaaatcaaaagaagtatatgaccggatgtttcgttcagaccagccagggacatattctgcgtatgtgaactcactaaaatcagctgatcataaatacagacgaaacatgaaggaacgaaaggcggaaaatctgtatgtcacgatcaaaaaagaattgaaggattgtgcagaaggagatgagcaagttcagtatattttggaccagattgaaaaagagcaattcctgcccaaacagttgacaggtgccaatggagtgattccgaatcaggtgcaccggaaggaaatggcaagaatactgaagaatgcagagcgttatttgccatttttgaaggaacaggatgagagcgggtatacggtatccgagcgaattttgaaaattttttcttttcagattccatattatgtgggaccgttgggggtaggcagcaaaacgggatgggttcagagaaaggcatcaggaagaattttgccgtggaatctggaagaaaaaattgataagcaggcgactgcggaggaatttataaagcgcctgattcgttcctgtacatatcttgccggtgagaaagtgatgccgaaggcatcgctggcatatgaaaagtattgtgtcttaaatgagatcaataatcttcggattgatggagaacgtattgacacggagttgaaacagcagattttcaacgaatgttttatgtcagggaaacgggtcacaagaaagcagctttgtaagcatttggaaatgtggggaaagatcaaatctgaagatcaggtgagcggtattgatatcacgatcaaccagtcgctgtcgtcttatggaaagatgtatgctattttcggtgatcaattaaaggaggataagtatcgggatatcgcagaggatattatttactggggaacggtatttacggattctaaaaagatgtatcgggagcatctgaacagatatattgagtccggagatctgacggagtcagatgtgaagcggattctgggatacaaatttaaagactggggtagattttccagagctttgctcgaattgcagggctgtgataaatcgaccggcgaaaaagtgtcattgttacaggcaatgtggaataacagtctgaattttatggaactgatcaacagccctgattttacatttagagaagccctggaagaaaagcaggttaatctagaaaagacactcactgattttgaatatgaagatttagaatgctattatttttctgcacctgtgaagcggatgatctggcagacgattcttgtagtgcgggagatcgaaaaggtgatgggacaggcaccggcgcgtgtatttgtggagatgacgagatcggacgaggaaaagggagaacggggaagaaaggcgtcgagagccagtcaattattgctagcgtataaaaatattaaaaatacacagatccgtgattggaaaaaagaaatatctgaagcggaaggtaatggtaaactgcgtagtaagaaattgtatctatactatatgcagatgggtcgtgacatgtataccggaaaagagatcgatcttgcaaggttgtttgatgataatttatatgatattgatcatatctatccgagacattatgtgaaggatgacagtattatcaacaatctcgtgctggtcaataaagcagcaaatgaacacttgaagaaagatttgtatccgattcctgcgcagattgcgtctaacccagaggttcgggagctgtgggatgctttgcacagagcgaaattgattacggatgaaaaatatcatcggctgacgtcccgtgaacaatttacagaccaacagatgggagattttatcgcgagacagctcgtagagacaagtcagggaacaaagggtatagcggaacttttgaaagcattgcttccagagacaacagaaattatctatgcaaaagcatcgaatgtcgccgagtttcgacataaaaatggatttgcgaaaagtcgtctggtaaatgaatttcaccatgcgcaggatgcttatctgaatattgttgtgggaaatgtttactatacaaagtttacgaaaaatccctggaattttattaagaacgattatgaaaaagataaacaaaaatatcactacaatatggatcgaatgttcgactgggatgtcacgcgcggatcagaggtggcttggatcgtagataggaaagacaggaggggaacgattgatactgtgcgtgaaatgatgcgaaagaatacaccgctgatgacgaggatgagctttgaacagcatggaggaattgcaaatgccacgctatattctgcaaagaaagtgaaaacggaaggatattttccgttgaaagcatctgatgcgaggttgagtgatattacaaaatatggcggatatacctcggctacgattgcgtactattttattgtgaggtacaaaaaaggaaaaaaagaaattatatccgtagagggactgcctatattatttaaggaaaaagtagaacgtaccgcgaatggtctggaacggtattgtacagaacaattaggctatgaaaatgtacagattcgctgcaaaaagctgcggatacaatcactgctggagatcaatggatatcggatgtatttgtctggtaaaacggggaatcagttaattatgaggaatgcaacaaatttgtgcctatccgataagcaaattcgttatatcagaaaaatagaaaaattttctgaaacagaagtcttagatgaagtgctatgtgaagctgtaaatatacaattatatgatgctttggtagaaaaacatatgcatacgatctatgcaaagagaccgaacgcggtaggtggaaagttggagaaagcaagaaagcgatttgtggaacttgcagtggatgatcaatgtaaggtgttgtatcaaatgttgcaattgactaagatcggactgatccgtgctgatttgactttgattggggaatctgcacatacaggagtcatgttaatcagtaaaaaattgaaacagacggactctgtatatttagtagagcaatcagttaccggactgtatgaaaaaaaacgaagtctgagctcactgtcataa

SEQ ID NO: 154 - DNA, 4002 bp, Unknown
  OMNI nuclease sequence
atggaaaaattttatttgggtatggatatcggcacaaactccgtcggaatggcttgcaccgatgaaaactatcgtcttttaagagcgtgcggaaaagactgttgggcggtcagactgtttgacgaaagtcaaaccgcggcggagaggcgagtatcgagaacggcgcgtcgccgtctggcgcgaagaaaacaaagacttggatttttgcagacacttttcgcgccttatattgctgataaaacattttttatcaggcttaataacagtcagtttttatccgaagataaggacgagcggctcaaaaaagacataaacacgcttttcgccgacgatgggtttacagacaaggattatcacaaaaaatacccgactatatatcatctgagaaaggcactgatgacggaggacatctccgacatgaggctttactatcttgcgcttcaccatatcgtcaaatatcgcgggcacttcttatttgaggggtcgatggctgatataagggatatgacgaaacttattttcgatctcaacgctgcctgcgcggatgtgttttttgaggacgcgccgtcgtttaacgtttccgtatgtggacaggcgaaagcattgctgatgtcggtcgagagaaataagaatgcaaagttagaggatatcttcgggcttcacgataagcgtgcaaaagagataataaaaggtatttgcggttattcggtcaagccatcgacgcttttttcggaacgatataaagaggaaaaatctttctcgttcaaggatctgacggacgaaacgtttgacggaatgcaagccgtttacggcgacgactttgcactgcttacggcgatacgcgccatatacaactacatcacgtttgaaaagatactcgaaggacaagccgacatctcttccgcgatggtcaatatttacgaaaagcacaaaagagatcttaaaaaacttaaagatttcttgcttgaaaacgccactcgagaggaatataacagatttttcaagagcgttgaagagggcgcaaactacgttaactatataggttacacaaaaaagggcggcgataaaaagaaggtcaagcattgtaaagacgaagagttttttgcttacgttaaaaagttcattctctctttaaaaggcgtcaaagacgaaattgcggcggcggaatttatttcggaggcggaaaacggcgcgttgctgcctaaaattcttcacgcggataacgggctttttccgcatcagataaacgaggacgaactcaacaagatagttgcgaacatggtcagaaattgtcccgaaacggatgaaatatctgaaaaaatcgcgcccgtttttctgttcaggatcccttattacgtcggtccgctgacgggcaaaaacagttgggctgtccgcgaaaaagacaaaatcacgccgtggaacttcaaccaagtcgttgaccttgcaaaaagcaacgaggcgttcatgcggcagatgaccaataagtgcagtattctgcacggcgaggacgttttacccaaagcctcgatttactatcaaagatacaacgttctgaatcagataaacaaactgaaaaaaaacgacgtgcccatcgacgttgaaaccaaacaaaaaatatttaacgaactgtttttaacgcgaagaaaagtcaccgacaatgcaataaaagacgttctcgtccgcagcgggctgataagcgaagcggaaaagaagcaagtgaccatatcgggaaaagacggcgaactttccgcgagcatgtcgtcatacatacagttgaagaccatacttggcgattttgtcgatcaggaccttttatgcggtggagaagtgtgcgaaaaaatcattttatggcatacgctcaacaccgataaaaacatagtcgttgaacttataaataagaattacggtcatattccgcagataaaatcaaacataaaagcccttaaaggacttgtcttcaaagatttcggcagactgtcaaagaaactgcttacggggctttgctttacggacaatcaaacgggtcaggtgtactccgttctcgatcttctttacgaaaccaataaaaacctcaacgagatactctttgacaaagattacgggttcgaagatatgatcagagaggaaaacggcgagaacgatacaaaagtcgattatgaagacgttgcaaagttgtacgtttccccttcggttcgcaggggtatctggcagtcgcttaaaatggctgacgaatacgtcgaaagaatcgggaaagcccctgacaagatttttatagaagtcacccgcgaggaaggcaagaagggcgacgccggcaggactgtttcaaggcaaaaacaacttctcgaaaagtataaggggatagagggcatatcggaacttgacgccgaacttaaagaaaagacggatttgcagcttcgtcaggaaaggctgtatctatacttccgccaactggggaagtgtatgtactcgggcgagaggatagaccttgaacttctcaatacgaaccggtatgacgtcgatcacattctgccacgcacatacgttaaagacgacagcctcgacaataaggttctggtcttgcgcgtgaagaacgcgcaaaagtccgaccaatatcctatacctttttcgctcgtgacggacgaggcgcgtaatcattgggcggtattgagggcaaaagggcttatttccgaaacgactttaaaccgtctgacgaggacggagccattgactgaaaacgattttaacgattttatcaaccgtcagaaaactataacagatcagacagtcaaagccgtagcggaacttctttcccgcaaatatcccacggcgaaaatagtatacagcaaggcaaagaacgtctccgatttcagacagaagttcgacttgttcaagtgccgcgaaaccaacgacctgcaccacgcgagagacgcttatctcaacgtcgtcgtgggcaacgttttcgatacgtgtttttcaactccttttgcaacgtactataaagacggcgataaatggcgcgaatacaacctgaaaacaatgttcgcacgcaacgtcaagggcgcttgggtgcaagataatgcgcaatcgatttccatcgtcaaaaggactgttcagaagacaagtatggcggtcacgagatacgcataccgcaacaagggcgggttctacgaccagacagtttacggtaaacatgacgcgagcattaccgcaccaagaaaggaaaacggaccattggctgatcataccaaatacggcggatataagtcgcaaaagaccgcgtattttgccattgtccaatcaaacgacaaaaagggcaggacgataaagacgatagaagccgttccgattatgatagattatcaaagcgtaaacaatcctgaccgcttgagtgggtattttgctacttaccttaatgaacctacggttatagtaccgaaaatcaaagtcaaacaactcattaagttcaacggaacgctttgttttatggcggggataaccggtagcagcataattttgcacaacgccgttgaattgttcaccgataacaaaacggacgaatacttaaaggaagtcgttaaacttgtcaactcggcaaagagcggaagcatagatacaaccctcgccgaatacgtcatgaagacaaataaagatggcgtgataaaactcgtaatagatagcgaacgaaacgtttccgtgttcaatttgttgatcgataagttgcggtcttcaagatatacaggcgtcggtgcggctataacgttttgtaagacgctgattgccggggctgaaaacttcaaggcgttgaagactttcgatcaagctgtcgttttgctccaaatcctgaggtttttcaagtgtaatgccgaactgtccgatctcagtctgattggcggaccgaggtttataggtgtgctaagggtcaacaagaatataaccgaaattgattttcgtatagtgcatcaatcgccttgcgggctgtttgaatgcgaacagaaagtataa

SEQ ID NO: 155 - DNA, 4188 bp, Unknown
  OMNI nuclease sequence
atggaaaaaaattattttgtcggattagatatgggtacatcatctgttgggtgggctgtaacggacgaaaattataaccttataagaaaaaaaggcaaggatttgtggggaattcgtgaatttgaacctgctaatacagctcaggaacgaagagcaaacaggatatccaggcgtagaagacagagggaattaataagacttggccttgttaaagattattttgcggatgcaattgcaacggttgattccagcttttaccagagactggaaaacagtaaatactatcttgaggataaagatgaggatgtcaggacttcaaatggtatatttaatgataaagaatataaggataaggattactacaaagaatatcctacaatttaccacttaagaaaggaattaattgaaaacaaaaacaagccatatgatgtccgtttggtttatcttgcaatttctaaccttttcaaacgtagaggtcattttttaaataatagtcttaatgtagataatggaaagttcgatgtcaatataaaagaagcatatgaagaattactaaattctatatcaagggcattttcagacgatgaatctgaatcactgactatgccggttattaatgaagattgtgtatataaggaactggaaaagatacttggaaacagagattattccagaaagtataaagccgaaaaaatcagagacttgctaaatattgataagaaggcaaaaaagcagaatgaggttataaatggtatcgtaggactcaaaatagattgctgtaaggcttttggaataactgattcagaagaaaagatagaagcaaaattttccgaattcggatattctgaaaaagaacccggaatattggaacttttaggtgacgtgcttggtgaagttcttgtgaatataaaaagaatatatgatgcggggacacttacagagctgcttaaggggtataattatctttcctttgcacggtgtagtgattatgagaagcataaagaagacctgaggttattaaaaatgcttgtgaaaaagtatcagcctgaacagtttgacagcatgtttagagatacacatgatggttcatacagtgcatatgttaattcgtctaattcagaaaaatataattattcggaaaatgggataaaaaaaccaaatagacgaaatatggataagaggagcaaagcagatttttattcaacagttaaaaagatgctttcaccgttcgccaatgaagatgaaagagttcagacaattcttgatgaaatggaaaatgggacatttatgccaaagcagcttaacggagataatggtgttataccgaatcagttacatgcaattgagctaaaggttatacttcaaaatgcttcggagtatttaccattcttgaatgagattgatggaagcggtcttagtgtagctgaaagaatatacaaattgttcacgtttactttaccatattacataggtcctacaacagaaaaaagtaaaaccggatgggtagtcagaaataagggatatgagaatacgcatgttttgccatggaatatgaatgacgttatagatcaggaaaagacacataaagaatttattgaaagaatggttcgcagatgtacgtatatgaataacgagcaggttttacctaaaaactctctcctgtacgaaaaattttgtgttctgaatgagataaataacataagaattgacaatgtgcgcattgataataatctgaaaaaaacaatatataatgagctgtacaaaaaagggaaaaagcctacacttaaaaaactccatgattgtctgattctgaatggaatctcagagtctgcgcagattacgggtatagacagagaaataaataattcattagcttcatatggcaaatttgcaccaattatgggagaacttcttgatacagatgatggacgcaaggttgttgaagatataatttatacatttactatatttggagatgatagaaaatatttgaaagaatatcttcttaatacatatccggaaaatgaatatccatatatgactttatccaatataaagagaattcttggatttaaattcagcgactggggaaggttttccaaggaattacttatgctggagggatataatagagagactggggagatatatacactgcttgatgctctttgggaagaaaattataatttcatggaattgataaatagtcctgttttctctttcaaggaaagtatggataagctggagaaaaatactttgagttctttggcggagcttgatgtagaagtattggatagatactatttcagtgcacctgtgaagagaatgatacttcagacaaatggtgtattaaaagaaattgtaaaggtaatgggaggggctccaagaaaaatttttattgagatgacaaggagtgacgaacaaaaaggagatgcaggcagaacatcttccagaaaaaaacagttgcttgatttgtataagaatgtaaaacaagaggttgccgacaggaagtattggtccgatttgattgaacatgaatcagaaacaggcagaattaaaagcaaaaagatgtatctctatataaagcagatgggatgcgatatgtatacaggtgaacctattgatctggatgaactgtttacaaatagatatgatatagaccatatttatccaagacattatgttacagataataatattgagaataatcttgttttgacaaataaggcatcaaatgagcatatcaaaaaggattattatcctatacctgaaaaaatccgcaacaatcctgcgaccattgagctttgggacagacttcatgcaaatgggatgattaatgatattaagtatgcaaggttgcgctgcaaggaagaattttcagatgaacaaaaagctaattttattgccagacagttggttgaaacgagtcaaggaactaagggaatatccgatttgctaagacagatgcttcctaccagtgaattggtgtttgtcaaagcaaacaatgtatccagattcaggcagaataaaggcaggagacataaaaatggtgacaactctcctgtggaagggttctcaaaatccaggttaataaatgattttcaccatgcaaatgatgcgtatcttaatattgttgtaggaaacgtttatcatactaaatttacatctaatccacttaactatatcaaaaaagattacagacaaaataaagaaaattttgaatataatcttggcagaatgtttgaaacaaaggtagtaaggaatggatatgtggcatggattccggaaggcaataaggagaatcttgaacctacaattaatactgtaaataaggttatgagccgaaatacaccactatatacaagaaaagcatttgttaaaccgggaattgtaaataaggttacaatttatggaaaaagaaaagcaactccggaaagatatatgccattaaagtctggtgatccgaagatagcagatgtaactaagtatggtgggatgacaagcataagcatttgctattatttcctggttgagcatgaggttaagggaaaaagaataagaactatcgagggattgccgggatatatgcacaccagagtagaaaataatcctgatgaattagaaaaatattgtagagatgttcttaaactggttaatttttcgatacgttacagaaaaataagaatacagtccttgttaaaagttaatggttatagggcgaatttgtcaggaaagacaggtgatgccttgatattgcgtaacgcggagccgttgtatttacctgaccgatatcaggactatattgcttatttggaaaagcatagtgaagaagaataccacgataagcttgacaaggaagtaaatatacaaatctatgatatacttatggaaaaatttaaagacggaatatatagaaacagggctaaaaccgttggaaatataatgtccaatggaagggggcaattcattgaattatccgtggaaaaacagtattttgtaataaatgaaatacttaaattgacaaccataggtacattgacagcagctctcggagatattggaggtcgcagtaataacggaaaatttactgttggaaagaaaataagtgatttagatagctgccagcttattaatacatcatatacgggaatatttaacagtgctcctatagatttgaaaacagtatga

SEQ ID NO: 156 - DNA, 4074 bp, Unknown
  OMNI nuclease sequence
atgaataataaagaatactttttaggattggatattggaactggaagtgttggctgggctgttacggatactcaatataatttaattaagattaacagaaaatatgcatggggagctgttttatttgatactgcaaagggagcagaagagcggagagtaaatcgatgtgccagaagaaggtatcaaagagaaaaacaaagaattaacttgctgcaggaattatttgaagaagaaatatataaggtggacagtggattttttcatcgtttaaatgaaagtagatatgtatatgcggataaaagggatgaaaagggtgaaaaacctgaattaccgtattctttgtttgtagatgaaaattatacggatgtagattatcacagggaatttcctacagtttatcatttgcgtaaggcattaatgacagaggacagagcattcgatgttcgtttgctgtatctggcaattgctcatattataagaaacagagggcattttttatccaatatgggtatggatgaagtaaatttagattttagtaaaatattcggagacttaatgaattgctggaaagaaaatatggaggatgaaagccggaattctgttttggaattagaaaatgaaacaattgaaaatatagaaaagataatgaaaaattccgagttaaccaaaactgcgaagaaacagaagattttagaggaattaagtggatttagcaaagaatttaaagaattaattgctttaattacaggcggaaaggtatctctggcaaagctgtttgataaaaaagaatatgatacgctggagattgataaaatatgctttgacgaggcttcctttgaagaaaatgaagaaatttatgccaccaatttagatgattattttgaaataattactaaagcaaaagcggtatatgactggatgattttatcaaatatttttaaagatgataaaagtggatatttatcatgtgcaaaggttgcggattatgaaaaacataaaagagatttaaagaatctgaaggaggcgatacgaaatgatagcattggagatgaggaagataaaaggaatttatataagcaaacatttggtgttcctaaaaagggagaagaaaattattcaaaatatattggaatgactgcatcaaagggaagcaagtttgtaatagacggagcaaagtgctcaaaatatgatttttataaatttgtaaaaaagaatatcattccaaagttaaaagatggggaattaaaagaatatattgaaaaagagatttcattagaatcatttatgccaaaaacaagggtaaaagaaaatgccataattccatatcagattcatgctaaggaattaaagaaaatattagaatgtgcggaagcttatatgccatttttaaaagaacgggatgacagcgggaaaacagtaagtgaaaaaatcatgatgttattaaccttccgtgtaccttattatgtcggtccgttaaacactgccagttcccaggcatgggttaaaagaaatggaacaggacgggtaacgccttggaattttgaaaccatgatcaatgtagatctgagtgcagaaaaatttatagaacgaatgacaagtaaatgtacatatttaaaaaatgagaaagtattgccaaaaagctccctagtctatgaagaatatatggtattgaacgaattaaataagttacagataaagtcggaacccataagtgtagagttaaagaatgatatttatcatgatttgtttgagagaaaattaaaagtaactttgaagaaattagtagattatttaaagagagaaaagggttatacggatattacaaaggaagacatcagcggtatcgacattgattttaaatcttctttaaaaagttatcatgcctttaaacgggaatttactgatgttaatctttcagagagtgaaaaggaagatatcatcaaagatatgacgttgtttggcgcagaacccaaacttctaaaaaagcgcttatatgctaaatttccggattatgaaagtcagttaaattcgctgattaaatctttaaattgtaatggatggggaaggctctcttataaattattaaatggaattgcagtggaaatacctggtcagggaatggtaggaactgtattatatcaattaagaaatacaaacaacaatttaatggagattttagagaaaagcgggtctccctatgcaaaattaatagaggaagagaataaaacggatgatagtcataaaataaattatgagttagtcaaagaattgtatgtgtcaccggcaacgaaacgtcagatttggaaagcgattcaggtagtggaagaaatttctcatgccatgggacatccgcccaaaagattatttgttgaaatggcaagagaacatatggaatcaaagcgaagtattacacggaaaaataaattattggatttatataaatccataaaaaatgaaaaagaattgtatgaagaattaaagggacagccggaagataaactgcgaagtgataaactttatttatattatacacagtttggcacttgcgcctataccggtaaaaaaattgaattaagtgaattgtttaataataatttgtatgatattgaccatatttatccccagtcaaaaaccgcagacgatagtttagataatcgtgttttggtttgtaaagattcaaatggatataaatcagatgtatatccaattgacagtgatatacagaaaaaaatgtggaatatatggtatttatggtattcaaaaggtttaatcagtaaagaaaaatataaaagattgacacgaacatcagaattgaccaatgatgagctgacaggatttattaatcggcagttggtagaaacaaggcaaagtaccaaggaaattatgaaattaatgagacagttgctgccggatacggaattggtatattccaaggcaggaaatgtttcaagatttcggcagaaatataaaattttaaaagtaagagaattaaatgattaccatcatgcaagagatgcatatttaaatattgtggttggaaatgcatatcatttaagatttacaaaagatattcgaaactactttatgaaatatggaacttatcggacctataacctgaaaaaaatgtttgaaaaggatataacctttcaggaggaggttgcatggagagctggagagaggggaaccatacagaccgttttaagatttatgaattgtgataaggttctggtaaccagacaaacattcgaaagaaaaggagcattgtttgacgtccagccaaagaaaaagggagaagggcaggttccgattaaaagtggaattaataatgagaggttagctgttattgaaaaatatggaggatacaatggagcaacaatttcttattttactttgatagaaggactgaaaaataataaaaataaaaaacgatatattataccggttccattgtatctgtgtcataaaatagaaaaagatgaattatatgcaaaacagttttttgaaaaagagtctaaattatctaatataagaattattagaaaaatattgattcagacattaatgattgatgaaggatttaaaatgaggctggcagggaaatcaggaacacaactgatttttcataattctaatgaattgtcattaaataaaaaacattttaagtgtttaaaggaaatagaaaaatttattcttgaccgaaaagataagccggatgccacaataaatgagaaaagtgaacttgcaggtaatcaaatgctggatatctataatatatttatagataaattaatgaactcagtctattcgaaagagttaggaaaacatggcgaatttttaaataatggattggagcaattcaataaattatctttagaagatcaggcaatacagctccatgaattattaaagtttttccaatgtacaccagaaatgcctgatttatcaagagtcggaggtagtaaatcgattggtgcgatccggagttccatggatgtaacaaaaagaagcaaattggcaattatacatcaatcggttacaggcatttatgaaaaaatcgaaaggataaacgaatga

SEQ ID NO: 157 - DNA, 4068 bp, Unknown
  OMNI nuclease sequence
atgaaggaaagagaatactttttaggcttggacatgggaacaggcagcgtaggctgggcagtgacagacacggagtacaatttaattaaaattaacagaaaaagggcgtggggctcagttttgtttgagacgtctaaaggagcaaaggagcgcagggtaaacagatgcgcaagaaggagacttaaaaggcagaaggagcgtctgaatttattaagggagctgtttgaggaggaggtgcagaaggttgacagcggtttctttttaaggatgaaggaaagcagatatgtatatgatgataaaagagatgaaaacggagtaaagccacagcttccatactctttatttgtggatgagaattatacggatgtagattatcacagagattttccaactatctatcatctccgtaaagcattaatggaggaggacagaaagtttgacgtaagacttttgtatcttgcaatagcccacatattaaaaaacagaggtcattttcttgcaaatatgggaagtgatgaggtaaatctggatttaaaggaaagctttaaagccttgctggataagtggaatgagatgatgacagatgatgaaattatgtctgttacagcaggctcagaacaattagagcagatagagaaaaccttaaaggatacaagaattgttaagagcagtaaaaaacaggaaattataaatatagtcggtacttccgacaagcggtttaaggaattggcatcattaattgcaggcggaaaggtttcattgtcaaagctgtttgacagaaaggattatgagtctcttgagataaataaaatctcctttgacgatgcgtcatatgaggaaaatgaggagtattatgccgcaaatctggaggataactacgatattatagcctgcgcaaagaatgtatatgacggaatgatattatctaatattttaaagggagatgaaagcggtcttatatccgctgccaaggttaaggattacgataagcatagaaaggatttgaggcttttaaaaagggttattttagaggaaggaataggagaagataaacaaagaaaaatattgtataaaagagtttttggagttacaaaaaatcaggataataattattcaagatatgttggcgtggtttcgacaaaaggaagaaaaggagtaatagaggataaaaagtgtacaagagcagatttttataattttataaagaaggagatattacctgaaataaaggagggagacaataaggagtatattaaaaatgaaattgaggcggattcctttatgccaaaagcaagagttaaggagaactctgttattccgtatcagcttcacaaaaaggagctgaaaaaaatactccgcaatgcagagaaatatcatccttttttaaaggaaactgacgagaccggaaaaagcgtaagtgagaaaataataatgctgctggaatttaaaattccatattatgtgggtccccttaacgtgtcgggaagcaatgcatgggctgtgagaagcagcggaaaaataactccgtggaactttgaggaaaaggttaatattgaggagagcgctaagaattttattgaaaaaatgacaagcaaatgtacatatttaaagaatgaggatgtacttcccatgagctctctgacatatgaaaaatttatggtccttaatgaaataaacaaaattaaaataaattcagagcctataagcgtggagctgaagcaggatatatatcatgagctgtttgagaaaaagcttaaggtaactgtgaaaaggctgatagattatttgaaagcagagaagggctatgcagatttaaaaaaggagggtataagcggaatagatatagaaataaagtcttctttaaaaagctatcatgctttcaaagaaaaatttacaggcgttaatttatcagaaaaagctaaggaggacataataaaggatatgaccttgtttggcgcagagccgaagctgttaaagaaaaggcttacatcaaagtatcctgagtatgaaaatcagataaattcattgataaaatcacttaaatgcaaggattggggaagactatcctacaaactgctaaatgggctggctatagatgtgccggggcagggaatgataggaacggtaatgtaccggctttggaatactaatgagaattttatgcagattatcgaaagcagtgattcaccttatgccaagctgataagagaggaaaacggtgaagctcggaaaaaaggcatagattattctttagttaatgatttgtatgtttctcctgctgtaaaacggcagatatggaaggctttgcaggtaactgacgagattatgcatgctatgggtaagcctccaaagcgtgtatttgttgaaatggctagagaagaaggggagaagaaaagaagcgttacaagaaaggacaggcttattgagctttataagtcaattaaggatgagaaagcgttatatgataaattgcttaaaacagataacgacgctttgcgaagcgataagctgtatctgtattatacgcagcttggaaaatgcgcgtatacagggaaaaaaattgaaattgatgagctgatgaataataataaatatgacatagaccatatttacccaaggtcaaaaacggcggatgacagccttgataacagggtgctggtatataagcctgtcaatggagataaagacgacaggtttcctcttgacgggaaaattcgtgaggatatgagaaatacttggcttgtgtggaaacaaaaagggcttattagtgaagaaaaatataaaaggctgacaagaactacagagcttacaagcgaagaattattaggctttgtgaatagacagctggtagagacaagacagagtacaaaggcatttgcagaggccttaaggtatgttattcccgaagaaacagaaatagtgtattcaaaggcaggtaatgtttcaagatttaggcagcagtataagatacttaaggtaagagatattaatgatttgcatcatgcgaaggatgcgtatctgaatattgtggttggaaatgtgtatcatcttaggtttacgaaggatgtaagaaagtattttgacagaaatggtacttatagaacgtataatctgtacaggatgtttgattttgatgttaattatagctttgaaatggcatggaaggcggggaaggacggaactataattaaggtaaaggagacgctgaaatgtgatagggtgcttgttacaagacagacatatgaggctggaggaaagttatttgatgttcagccaaagaaaaagggagatggacaagtaccgcttaaaagtggaaagaataatgaacgtcttaataacattaatttgtatggaggatacaactcagcttcaattacttattttgtattaattgaaggaaaggataagaaagataaactgtctaaatatattgcgcctgtgccgttacatctaaagaaaaagcttgaggaggatgaaaattttgcaaagaaatattttgcggaagaatataagcttaaagatgtaaaattggtaagaaaaatattgatacagacgcttatggttacagatggctttaaaatgaggttggctggaaaatcgggaacacaattaattgttcataatgcaattcagttgattgtaaatgaaaagtattataagccatttaaagaaataagtaaatttatgcaagaccaaaaacagaaaaaaggtataagtataaaccaaaatagtggaattacagacgaggcattagtggatatatattatatgcttaaagaaaaattagaatgcagtatatataaggggttacctgataattttaaaaatattatggaaaagggcattgataaatttaaagagctatccatagatgaaaaagctgttcaaatatatgagttattaaaattgtttgaatgtacatcagagatgccagatttatcaagaataggaggaggaaaaactagcggagcaatacggattagtatgaatgtgactgaaaggaaacatttatcaataattcatcagtcggtaacaggaatatttgaagtaatagagaggataaattaa

SEQ ID NO: 158 - DNA, 4164 bp, Unknown
  OMNI nuclease sequence
atggaaaagaattattatatcggactcgatataggaacaaacagcgtgggctgggcagtaactgacgaaaaatattccgtagtcaagaaaaaagggaagcgactttggggcgtaaggctcttcgacaccgcggcgacggcaaagaagaggagactcaaacgaacggcgaggagaagatacttaagaagaagacagcgtatagatctcttgcaggaattgtttgcgccgcttattttagaaagggatgagaattttttcagacgacttgacgaatcttttttctttgaagaagataaaaaggttgacggtaaatattcgctgttttccgataagaattacaccgacaaagacttttataaagaatataagacggcgtatcatcttaggaatagacttattaagggagatatccctgacgatcctcgtatcgtatatcttgcatgtcaccatatcataaagaaacgagggcattttttatttaacggcgaaatcaacggcaataacatatcgtgcgataacgagataagagggctgcaaaaattcgtgaccgacggaaacgatcatgacgttcctatgttcggaggagataacttcaaggacttttctttggatgaattcgtcaagataataactttgaccgatacgagaagagaaagtattgaaaaaacgacggagcttttcggcgtttcggatggtaagtatctaaagaacgccgtaagagtgatgttcggatacaaacaaaaggtaaaaacattattcgcgagcgaatattacggcgattgcgatatcgagatagattttacgtcggagcaatacgaggaaacgagcgaggctctgaaaatcgagctgggagacgattattcctacgtagacacgctaaagaatctttatgattttgtggttctcaagcggctcctacaagaacactcgtcgatttcggaggcgatggtatcgaaatacgaaagacacgcagtcgaactccgtatgctcaagaatattgttagaaagtacggtaaaacgagcgactataacgagatattcaaagaaacggtttccgatgccagttatgcaaaatatattggtatgaataagaaaggcggcgtcaagcaggtaacggaacgcgagagcgcttacagttacgaaacgttttataaggcgctattgggcaaactcgatagcatagtaaccgataaaagcgacgccgattatctttgcatcaaaaaccgcattgaaaataaggattttcttatcagatacgcttcttccgtgaacgcgtcgataccgaatcagttacatagagacgaacttaacagaatactcgataacgcgagcgtaaaattcccgtatttgcttgaaaaggacggcgacggactcagcgttaaagataaaataatgagtatcatgacgtacaagataccgtattacgtcggacctattcccaatgacgaaaacagcgaagccatcggtaaatattcgtggctcgtaagaaaagaatcgggcaaagtgctgccttggaattttgaaaagaaggtcgatatgaacgcttctatggagaaattcataaagagccttatcaaccgttgcagctatttgaatacggaaaacgtattgccgaagcagtcgctgatatatcaggaatacgaggttcttaacgaacttaacggcattaagttcaacggtaagcgtatagataacgaaaccaaactaaagatattcgaaggcttatttaagaacagcggaaagaaaaagataacggaaaagattctcaaagcgttccttgtcaacgagaacgtagtcagtaagagcgatataaacgccttgaagatagacggctatcaaaaagacaaagagttttctacgtgtcttagctcttacgttaatatcgtaaaagctctcgggaacgattttgacagagggtatgtcgataacaatatagacacgttcgaaagaataattgagctaagtaccgtatatgccgataataaatcgctattcgtagaaaaactgaaacaagagtttcctgcgcttgacgagagggtcatagcgaaagtaaaaggattgactttcacaaaatggggaaggctgtcaaaacggcttttggtaggagtcgtagctagcaataccgcgacgggagaggtgtcgaatatactttctttgatgcgtaacacgaacgctaactttatggaaataatattcgataaagaatggaattttaacgcgttgatcgaagaggagaacaagagcgtttcaagacagatagacaagatcaaatattcggatatagccgagctgtattgctctccgtctgtcaagcgagctatatggcagagcataaagatcgttcgcgagatagtcgaaataatgggttatccgccaacgaagttctttgtcgaggtgacgagaagcgatgaagataagaagaggacttccagcagaaagagcgtattgcaaaagctgtataagggcgtagacgacagcggcgatataaaagccataaaggaagcgctcgaaaaggaaaacgaaaattcgcttaaggacgagaggctttatctgtactattctcagcagggaaagtgtatgtatacgggcaagccgataaatatagacgatctcttgaatacgaagctctatgacatagatcatatatatcctcagtcaatgactaccgacgagagcgttcataggaataaggttttggtgtgtcgtagcgcgaataaagataaaagcgacgtatatccgctgaatatagaagtgcagaataaaatggcgggattttggaagagtcttcgagacaaagaattcattactcccgaaaaatatatcaggttaacgagaaaagaacctcttaccgacaaagaactcggcgactttatcgcgcgacagttggtattcacttcacaaagcgtgaaagaggtgataaatcttcttaagatagagtacccgaactccgagacgtgttacgtgaaagcagaagtagtaaaggattttaggagcaggaacaattatctcaagataaggactctcaacgatctgcatcatgcgaaggacgcatatctcaacgtagttgcgggaaatattctttcgacggctaataagaataatttccgtatgcagaggatcaataagggtaacgaaatcgatacggatattatcaaaaactacagtatttccaatattttctcaagaggatacgtcgtgtcgaccgcaaagaacttagcttggaactgcgaccttttcgataacgtagaaaagcagtattataggaacgatattctcgttaccaaaatgcagaccgtaggcaaaggcgcgttttacgacgagaccgtgaggaagtcgcttgctaacgcgaagtatgctaaggcagcgcgtaaggcaagcataccgctcaagaaagtcgaaggaaatcgttatagcatagagcgctacggcggcgtaactacagtgtccccgagatggttcgcgctgatcggatgtagcgataaaaagaataaccaaatataccgcatagaacctataaatatatacgactatgcgaagatggacaaatcgagaattaaggacgagatggcgtcattattggaacgtcaaggacataagaacgtcgatatcattgcgattttgaagaaaaatactcttctttcgatagacggcaatagatattatcttaccggaacgtccggagagtctctaacgctcgataatgcgaaacaattgactgtcggcagggaatacgagcttgccgtaaacagaatattgaagtatacggagaacccgaaaaggaacaaggacgttaccgaggtagcgattcgttcaaagtcgaaagaagattataatatcgatgaaaaggcggtattcgtcatgcttgtcgataagctaaagacggaatttccgcagtttagagttgtcgctagcaagttcgacgatgaaagtatagaggcgttcgatacggcaagcaaatcaagacagtgcgaaataataacgaatatcataaagatgacgggatgtaattcgacgagaggaaaacttgacggagaaccgttcaacgcaaatttcaaggcgagcgaaggagctcttaccgctaacaaaaaagtatcttacgagcttaccgttatagatcagtccgttacaggcgtatacgaatattctaaaagcataaagaaatga

SEQ ID NO: 159 - DNA, 4164 bp, Unknown; identical to SEQ ID NO: 158
  OMNI nuclease sequence

SEQ ID NO: 160 - DNA, 4164 bp, Unknown; identical to SEQ ID NO: 158
  OMNI nuclease sequence

SEQ ID NO: 161 - DNA, 4164 bp, Unknown
  OMNI nuclease sequence
atggaaaagaattattatatcggactcgatataggaacaaacagcgtgggctgggcagtaactgacgaaaaatattccgtagtcaagaaaaaagggaaacgactttggggcgtaaggctcttcgacaccgcggcgacggcaaagaagaggagactcaaacgaacggcgaggagaagatacttaagaagaagacagcgtatagatctcttgcaggaattgtttgcgccgcttattttagaaagggatgagaattttttcagacgacttgacgaatcttttttctttgaagaagataaaaaggttgacggtaaatattcgctgttttccgataagaattacaccgacaaagacttttataaagaatataagacggcgtatcatcttaggaatagacttatgaagggagatatccctgacgatcctcgtatcgtatatcttgcatgtcaccatatcataaagaaacgagggcattttttatttaacggcgaaatcaacggcaataacatatcgtgcgttaacgagataagagggctgcaaaaattcgtgaccgacggaaacgaccatgatgttcctatgttcggaggagataacttcaaggacttttctttggatgaattcgtcaagataataactttgaccgatacgagaagagaaagtattgaaaaaacgacggagcttttcggcgtttcggatggtaagtatctaaagaacgccgtaagagtgatgttcggatacaaacaaaaggtaaaaacattattcgcgagcgaatattacggcgattgcgatatcgagatagattttacgtcggagcaatacgaggaaacgagcgaggctctgaaaatcgagctgggagacgattattcctacgtagacacgctaaagaatctttatgattttgtggttctcaagcggctcctaaaagaacactcgtcgatttctgaggcgatggtatcgaaatacgaaagacacgcagtcgaactccgtatgctcaagaatattgttagaaagtacggtaaaacgagcgactataacgagatattcaaagaaacggtttccgatgccagttatgcaaaatatattggtatgaataagaaaggcggcgtcaagcaggtaacggaacgcgagagcgcttacagttacgaaacgttttataaggcgctattgggcaaactcgatagcatagtaaccgataaaagcgacgccgattatctttgcataaaaaaccgcattgaaaataaggattttcttatcagatacgcttcttccgtgaacgcgtcgataccgaatcagttacatagagacgaacttaacagaatactcgataacgcgagcgtaaaattcccgtatttgcttgaaaaggacggcgacggactcagcgttaaagataaaataatgagtatcatgacgtacaagataccgtattacgtcggacctattcccaatgacgaaaacagcgaagccatcggtaaatattcgtggctcgtaagaaaagaatcgggcaaagtgctgccttggaattttgaaaagaaggtcgatatgaaggcttctatggagaaattcataaagagccttatcaaccgttgcagctatttgaatacggaaaacgtattgccgaagcagtcgctgatatatcaggaatacgaggttcttaacgaacttaacggcattaagttcaacggtaagcgtatagataacgaaaccaaactaaagatattcgaaggcttatttaagaacagcggaaagaaaaagataacggaaaagattctcaaagcgttccttgtcaacgagaacgtagtcagtaagagcgatataaacgccttgaagatagacggctatcaaaaagacaaagagttttctacgtgtcttagctcttacgttaatatcgtaaaagctctcgggaacgattttgacagagggtatgtcgataacaatatagacacattcgaaagaataattgagctaagtaccgtatatgccgataataaatcgctattcgtagaaaaactgaaacaagagtttcctgcgcttgacgagagggtcatagcgaaagtaaaaggattgactttcacaaaatggggaaggctgtcaaaacggcttttggtaggagtcgtagctagcaataccgcgacgggagaggtgtcgaatatactttctttgatgcgtaacacgaacgctaactttatggaaataatattcgataaagaatggaattttaacgcgttgatcgaagaggagaacaagagcgtttcaagacagatagacaagatcaaatattcggatatagccgagctgtattgctctccgtctgtcaagcgagctatatggcagagcataaagatcgttcgcgagatagtcgaaataatgggttatccgccaacgaagttctttgtcgaggtgacgagaagcgatgaggataagaagaggacttccagcagaaagagcgtattgcaaaagctgtataagggcgtagacgacagcggcgatataaaagccataaaggaagcgctcgaaaaggaaaacgaaaattcgcttaaggacgagaggctttatctgtactattctcagcagggaaagtgtatgtatacgggcaagccgataaatatagacgatctcttgaatacgaagctctatgacatagatcatatatatcctcagtcaatgactaccgacgagagcgttcataggaacaaggttttggtgtgtcgtagcgcgaataaagataaaagcgacgtatatccgctgaatatagaagtgcagaataaaatggcgggattttggaagagtcttcgagacaaagaattcattactcccgaaaaatatatcaggttaacgagaaaagaacctcttaccgacaaagaactcggcgactttatcgcgcgacagttggtattcacttcacaaagcgtgaaagaggtgataaatcttcttaagatagagtacccgaactccgagacgtgttacgtgaaagcagaagtagtaaaggattttaggagcaggaacaattatctcaagataaggactctcaacgatctgcatcatgcgaaggacgcatatctcaacgtagttgcgggaaatattctttcgacggctaataagaataatttccgtatgcagaggatcaataagggtaacgaaaacgatacggatattatcaaaaactacagtatttccaatattttctcaagaggatacgtcgtgtcgaccgcaaagaacttagcttggaactgcgaccttttcgataacgtagaaaagcagtattataggaacgatattctcgttaccaaaatgcagaccgtaggcaaaggcgcgttttacgacgagaccgtgaggaagtcgcttgctaacgcgaagtatgctaaggcggcgcgtaaggcaagcataccgctcaagaaagtcgaaggaaatcgttatagcatagagcgctacggcggcgtaactacagtgtccccgagatggttcgcgctgatcggatgtagcgataaaaagaataaccaaatataccgcatagaacctataactatatacgactatgcgaagatggacaaatcgagaattaaggacgagatggcgtcattattggaacgtcaaggacataagaacgtcgatatcattgcgattttgaagaaaaatactcttctttcgatagacggcaatagatattatcttaccggaacgtccggagagtctctaacgctcgataatgcgaaacaattgactgtcggcagggaatacgagcttgccgtaaatagaatattgaagtatacggagaacccgaaaaggaataaggacgttaccgaggtagcgattcgttcaaagtcgaaagaagattataatatcgatgaaaaggcggtattcgtcatgcttgttgataagctaaagacggaatttccgcagtttagagttgtcgctagcaagttcgacgatgaaagtataaaggcgttcgatacggcaagcaaatcaagacagtgcgaaataataacgaatatcataaatatgatgggatgtaattcgacgagaggaaaacttgacggagaaccgttcaacgcaaatttcaaggcgagcgaaggagcccttaccgctaacaaaaaagtatcttacgagcttaccgttatagatcagtccgttacaggcgtatacgaatattccaaaagcataaagaaatga

SEQ ID NO: 162 - DNA, 4137 bp, Unknown
  OMNI nuclease sequence
gtggataataaaaaaatctttttggggctcgatataggtactaattcagttggctgggcagtaaccgacgacgaatacaggctgagaaaatttaagaacgatcttatgtggggagttcacctctttgatgaagcacaacagtctgccgacagacgtgcattcaggaccgcacggagaaggcttgacagacgcaagcaaagaattgctcttttacaggagttctttgcacccgagataatcaagaaggatcccacattcttcattcgccttaaagaaagcgctcttttgccgcaagacagagaacataggaacagcagtatattctttaacgatgacaactataccgacaaggaatacttcagccaattccccactatacatcaccttataaccgagctaatgaaaaatgataaccctcacgatgttcggctcgtttatcttgcctgttcatacattctggcgcacaggggacattttctgtttgaagttgaaaaagacgatatcgaaagcattaaaaagtttgctcccatttatgccgagtttatagacacacttaataatatatgtgatagcataccctttgatgataatatcagcgagcttgaggagatactgcgtctgcgctgcaccgtatccgaaaaagaaaagcggcttactgcactatggttcgccgggaaaaagccttccagagatctatgcgaagggctgagatttgacctgcttataaagctgttatctggcggaaaaacaaaacttgaagaattgtttatcaacgatgaatataaagatcttgaggtgtcctctgtctgcgctgcatctgctgactttggcgatatacttgattcgcttgcgggagttgtcacaccggaacagttctccctgctgagcgctgttaaaaagcttaacgactggtcactgcttgtaaacattctcaaaaacagcgacagcatttcccattcaaagataaaggaatatgaagcgcacaaaaaagaccttgaaatgctcaagggcatttgcaggaaatacctgaacaaaacagaatataacagcattttcagggacaaagaagaaaagaacaaaagttacaactcatacattaactcgcccaagaattgcagtcaggaggatttctgcaaatttgtccggacgtttattgacaaaataaagtgtgaagaaaatgacaagcaaacgcttgaatacttaaagcaaaaatgcgctgataagacactgtgtcccaagcaggtgaatacaaacaaccgtgttataccgtatcagctttactatcatgagctgaaatgcatacttgacaatgcttgcatttatcttgattttctgaatgaaagggacaaatacggcactgttgccgataagatcctcagcataatggaattcagaataccgtattatgtaggacctctggtcaatcacagcgataatccaaatgcgtggatgatcagaaaaagtgaaggaataatacgcccgtggaactttgatgagatggtcgatcttgataaaagcgaagttgaatttatcaagcgcatgacctgcaggtgtacttaccttgcaggcgaagatgtgctggcaaaaaactctctgttatattgcaaatatacagtgctcaacgagatcaacaatataacagttgatggtaaaaagatctctgtcgctgcaaaacaaaagatatataatgagcagtttatgaaaaagcgcagggtaactgtcaaaatgataggtaatcttttgcactcctgcggtgagatgacatctgagcagaagcttggcggtatcgacctgactatcagatcatcgctgaaatcataccacgactttaaaagtatgctggagcgcaaggtgctttgtgaatctgatgtcgaaaaaatcatcgagcgaataacagttacaactgatattacccgcctgaaaagctggctgaaacaggagtatccatcaatatcggcagaggatgttaaatacatttcaaagctgaattataaggattacggcaggctttcccgcaggcttcttgaaaacgtatatgaaacagatacaaacacaggcgaagtggttaatgagggcaatataattacaagactttgggaaacaaacgataacctgatgcagctgctcagctcaaaatataagtatatggaaagaataaaagctcttaataaagagtattacagtgatcctaaacactcgcttactataagtgacagacttaaagaaatgtatgttccaacagctgtaagacgatccataaaccgaacccttgatgtggtcaatgagataaaaagcattgccggaaaagatccagataagatcttcattgagatggctcgtgaaaatgacatgaccaaaaaaggagtcagaactaaatcacgccgtgagcagataaaaacactgtttgaagatgcaaagaagctgtctgatatgtcagcagaaatagcccatcttgaagagaaactttctgagacagatgacggaaagctgagaagcgaaaagtattatctgtattttacccagcttggaagatgtatgtacacaggtcacccgatcgactttgaaaagcttggcggcgatacctattacaatatcgaccacattttcccccaggcaaaaataaaggacgacagccttgaaaacaaagtccttgttgaatcggaagcgaacggtacaaaaagcgatacttacccgatagataaagatataagggataaaatgcgtggattctggaaaagcctgcacgaaaaaaagctgataggagataaaaagcttcagcggcttataaggagcactcccttcagcgaagatgagcttgcaggattcatttcacggcagctcgttgaaacacgccagtctacaaaagcagcagctgaattgctgaaagaactgtgccctgaaagcgagatcgtttacgtcaaagcagagcttgcgtcagatttcaggcacgaaacagatatgctcaaatgccgtgagataaatgacctgcatcatgctaaagatgcatatctgaatatcgttatgggcaatgtctacaacgcaaaattcactaaagatcccctgaattttatcagaagcggcgagcactattcactaaaaatgttcaagaaaaacgctgacggaaaaacaagcggactgcttacccacaaggtagaacgtaacggtactaccgtatgggatcctgccaaatcctttgatactgtccgaaagatgatgtccaaaaacagcgtaagatatgtcagatacacatataagcgtaagggcggacttttcaaccagatgcctgaaagcaagaaaccggggcttatccaacgcaaaaaaggacttaaaaccgaaaaatacggcggatataataacgcctctgtatcaacatttggtataattaagtgtaaaaacgatattgttataatccccattgagataatgaaggaatacaaattcttttcggataatatatttgcaaaacaatacgctcttgaaaaactcgaaaatatctatccgcaaaagaagtatcaatcattgacttgcgaagatattatcgttccgtgtatacactatcaggacggttcaaaaagactgccgatcttaaagatcaattcattgcttgaggtcaatggattcaggatcaatttatgctcaaaggatagtggtggaaaatatatgatcgtatccggtgccgaatctttgatttgcagttatcaagatgaaaaatacataaaatctgtatgttcctatgctgctaaaaccattgatgaaaaatcattgcaatacaacgggatatcatatgaaaggaatctggatatatatgatttgatctgtcagaaatgtgctaatggtcattttagtaaatggaaaaagttcagagacacttctattgttttgaataaaaaacgagatatattcatctctctaagtctgaatgaacagatttgtgcactgaaagaaatagtaaatattttaaaaagcggacgttctgtttattgtgatctgagtgcaattgaagagagtaagcaatcatgtatatcaaagctcggtgctgttttgacatcaataaaaagtgtttcagatatccgcatcatcgaccagtcacctaccggactttatgaaaaaaagtcggtcaatcttcttgagctatga

SEQ ID NO: 163 - DNA, 4284 bp, Unknown
  OMNI nuclease sequence
atggtaaaaaagtatttgttgggtctagatctagggaccaattccgtaggttggtgtgtaaccgatgagaataataaaattgttaaaaaaggtggaaaatcattatggggtgcaagactctttgaagaagctcaagatgcctcttctagaagagctaatagaattgctagaagaaggacccaaagaagagcagaacgcatcgatttgcttcaaatgctttttaaggaagaaatcgataaaattgattccactttctttttgcgtttaaaccaatcgatgtatcacaaagaagataaagacgattcaatttctaattttgataacttgctttttgtcgacgatagtttcaatgactttcattattacaaaaagtttccgactatctatcatttaagaaagtatttatatgatacgaatgaaaaagccgatattagattactatatttagccttggcccatatggttaaataccggggtaattttttaatcgaaggagaatttaaggcaaatgattccgggcaaattactttattgtttaaaaatttaaaatcggtacttcttgaattgccagatgaaaattcttgttctatagaacttaaggaaaattttgccgatgaatttaacgcaaaagtattaaaggcaaaaggcgtaagcgcgaaaaaagaagctttagaaactatgtttgggaaagataaatatcttaaaattgtaatttttcctttaattgctggttctgaagtagatacggcaaagatatttagcgattatgaaggcgatatcgatccggataaaatttccttttctaaagccgattatgatgacaagtatgctaaactgagcgagttttttccgaatgatttaagaatagaaatgatttctattttaaaagggatttatgattatgtacttcttggaaaactgcttggtgataaaagcacaatttcagaggcgatgattgaaaggtatgatactcacaaagccgatttaaaaaagctaaaagcctatataaaggctaatatcccagaaaaatataacgaagtatttagattgcatggtggtgataaagaaattaataactatgttaattatgttggttcaaccaattcaaatctaggaaaacttagatgtaagcattgcgatcaagatggtttttacaagtatattaaaaagattttgaagatcgatgatactaagttcgaagaaatacaagatgattttcttaaagatatttatacaaagattgcagataaatcttatttgccaagacaaaattcaaccgataatggcgtttttccatatcaattaaatttaactgaaatgaagaagattttggaaatccaaaaatcttattacccatttttagagaaaaaagacgatgatggtatttcaacaattgaaaaaatcgaaagtttgttaacttttaaaataccttattatgtaggtccgttgatgccggtaatagatggcaacccaaggtcctcgcattcttggatggttagaaaggatgataaaacaaaaatttatccctggaatttcaaacagattgtcgatgaagatcaatctgctgaaaagtttataaaaagaatgttaaataaatgtacatatctgccggattgttattgtttgcctttgaattctttgcttttccaacgttatagggtgttagaagtactcaacaaattattgataaatggaatgccattaacaaaagttttaaaagaagagctgattaatgaagttttcaagaaaaataagacggttacaaaaaagaaaatcgaagattatttaactaataagtacgagaaacctaattccattactacgtctaatgaaaaagaagttaaacaaattgatgcttcattgagcagttatgttttcttttctaatgttttaggcgaagaatatgttaaaaacaacgaaagtcaaattgaacaaattattaaagatttaactatattcgaagataaaaaaataatagaaagaaggctttccaaatatcattttacagaaaaacaaattaacgaaataaagtctaaaaaaatgactggttggggcaggctctccaaagaatttttaactatgaccacacgcttatttaacgaagctaccggggagtatattgataaatcattaatcgaggtgatgaatgataccaatttcaacttaatggagctgataaacgatactaactatgattttaaaagaaaaatagaagaagcaaatttcaaagatagagttacttataaagatcataaagaaaagcatgaggcgatagtaaaatatgttgatgaatgctacgtatcccctggaatgaaaagacctttaattcaggcgatgtctattattgaagatgttgaaaagattttagggtccccaatagatgaatactacgttgaatgcacaaggactaataaagcagagaaaaaagttaaagattctcgacagaagcatctacaagaattatatgaacaagcgaaaaaactcgctaaggccgaaataaaaaactcggctgacaaagaaagggttttaagtgaaatagattatttctccaacaaagttaaaaacgaaaatgaattgagtaaatttagaagtgataaatactatttatatcttcttcaacttggaaaatgtatgtatacattaaaacctatttcattagccgatattaatgataatagtaaatacgatgttgatcatattattccgcaagcaatgctaaaagatgatagcattgagaatagggtattggtttgttctgaagctaatagatataaaaaagccatttaccctgtttcggaagagttaattagcccaggggcaaaagccttttataaaaatctttacaagcttggccttatgggtgagaaaaagtacaataacttaattagaacgaagccattaagcgattctgacttaattggctttgtaaatagacaacttgtttatacaaatcaagctgtcaaagctttagtggatacaataaaaagattccaagtcaataaagatggaaatcctccaaaagtaatatattcaaaaggcgaaaacgtttctgattttaggaaggatttcgatattgttaaatgcagggatgctaatagcttccatcatgcccatgatgcttatttgaatatatgcgttggcagggcaataaacacttattatggtgatttcaattatttcaaataccaagaatttaaggaaaataaacgttcattcaatcctaagaaaattttttgcaataatgaaagagacggctcgaaatcgccattattagattcagatggaaatgttgtttgggattataaaacatctatttcagaaataaaaaagaatatatttacacgtttcgatgttttgactacgacaatgcaatatataaaaggcggtcaacttactaacgcaacaattaatccaaagggagacaatttagttccagttaaggaaaatgggcctctatctaatacaaaaaaatatggtgggaaaagcggcgtcacttactctatttattcccttgttgaatttattgatgggaaaaagaaaaaaagattgattgccccaattccactttctcaaataaagggcaaatatttaaccgacaatataatagattatctttcctccaaatacgggtataaagatataaaggttttaataccatgcttaagaattaattctgttttaagaaataagtcttctcgcgtctgccttagtggggtttgtgatgaaatgaaatcttactatgtcaagaatttatctgaaatccattatagcgagactgagcttcgcacgattaaaaagataaggaaaatgctagatattataagtagaaaaaagctagatatgtccaaggaagattttatagaaaaagtgtctaaactaatgattttttctactgattctataataataagcccggcagcaaatgaaagaacaaaagcggttgttttaacaaatggtcaacttgatgatctgtacaataaatttgtaacaatgaataaaaaacatatttctctttttaaaagttctttcgccataatagatttgttaaccaaagaagaaacaaaggccaagtttaattttcttaatatatttgaaaaaagcaaaatagttatggaattggttttgtatttcaattcatcaattcaaggcgcgaatttaagcttgattggagggccgtcaaaagctggaaaggcaagaattagttcaaatatcccatccggaatcgatattattgctgaatcgccaaccggtttctttactaagacattatggaaggctagctaa

SEQ ID NO: 164 - DNA, 4122 bp, Unknown
  OMNI nuclease sequence
atgagaggagcgcttttgatgggtaaaaactatattggtattgatatcggaacaaattcggtcggaattgctcagactgatgaaaattaccgcgtgctgaagttcaggggaaatgctatgtggacgtcggctgtctttgaaagtgctgcacaatccgccgagtgccggggcttcagggtggcgcgacgccgtcttgaccgccgtcagcagcggagagatctgcttattgaactaatggctcctgcaatagttgatatagaccctgttttttttaagaggatccgcgagagcgcactgtgggcggacgacaagaccacaggaagcaggtatacctatttcagtgatgagggctacacggacaagcagttccatagggattatccgaccattcatcatcttatctgcgaactgatgaatgatccatcaccgcatgacccgagactggtttttatagcgtgctcttacattctgactcatcgtggacattttttgaatgatgcggacaaggaaaagataagcgatgttctggatatcgggaaggtgttcaaaggattttctgactggttcagggataatgatagtgcatttccatttggtgattctgctgatgaattcggcaggatccttattaatgaaaagagcatcaggaaccgtccgggtgtgttttattcggtgtatttcggtggaaagaagccaaagcctgcgattgatgacgtcattgatgtaaacgagctgataaagcttgtctccggcggagtcatcgagctttccaagctgttcatgaacgaagaataccaggagttggagaacaacaaaatacgtctttcggacgcagcattcgatgaaaaggcgacaggtcttcgcgaaggtctcggcgatgattttgggcttatcgccgcggctaagaatatctatgactggtcgctgctgaccggagtgcttggaaacagcggctcgctgtccgaggcaaaggtcagggtatatgaaaagcacggcagtgaccttgccgcacttcgcagagttgtacgtcattactgcccggatcagtataagagtatattcaaaacatgcgaaaaaggcaattacacaagctattccggaaatgtgaaatcggttaaggatatcacaaaattcgagcgatgcaatcaggaggagttttgcgatcatctgaaatctcttctgaaaagtgttaagcctgagccaggcgattcggagtgcgaaagagtgcttaaggaaattgcggagcacacgctgtgtccacgccaggtgaactcggataaccgtgttattccgtatcagctttattacactgagctgaaaaagatacttgaaaatgctgcaaattacattccgcagcttaatgccactgatgaatatggcagtattgccagcaagatactccggctgatgacattcagggttccttattatgtgggaccgctggtgaagaaaaaggaaaagaacaacgcgtggatagtccgcaggggagagggtagaatactgccctggaactttgacgacctggtggacagggaccgctgcgaggacgagttcatcaaaagaatgacctgcaaatgcacctatgttgcgggcgaagatgttctgccgaagaattcgcttctatacagcaagttcatggttctcaatgaaatcaacaatatcaggatagacggaaagcgcgagaatttccctgtggaggcaaagcagaaggtctacacggagctttttgagaagcggaaaagggtatcggtgcgtgatataaagaatctgcttgtatcagagggttacatgaagccggaatctcagattgagggattagacatcaccgttaagtcatcgttgaaatcgtggaacggatttaaaaagctgctggcgtccggcatgctgagtgaggcagaggttgaggaaattattgagcgcatggcttgtacaaccgatatctccagattcagagcatggctggagaaattcggactgaccgcggctgacataaggtatatcagtggcttaaaatatgctgatttcggcaggctttcccgaacatttctgactgaaattccggatatagaccccacaaccggcgaggagctgcatccaaatattatcacgatgatgtgggaaaccaacaataatctgatggagcttctatcgaagaactataattatagcagtcagattgaaagcatgaaccaggaatattattctcagcatccgctcaagcttgacgagcgtctgagtgaaatgcatattccgagcgcggtcagacgtccggtaaagcgtgcagtagaaatggtgagagaatacagcagagccgtgcacaaggctcctgaccgcatttttattgagatgtcgcgcgacctgacagacccacagacaaagggaaagcgtactcagtcccgacgggatttcatactggaatactataacaagctgaacgaagacaccacagcgctcagggcactgcttgaaaacaagtcggacggtgaccttcgtagtgaaaaactgtatctgtactttattcagctaggcaggtgcatgtattccggtcagagcattgatattgagcagcttgccggggagacttataatgttgaccacatttttccacggtgtatggtaaaggacgacagcattgagaacaaggtgctggtgctttcaacgctgaacgcagccaagggagataattatcctattgctccgggcattcagcgtgatagatatggcttgtggaaaaagctcaaggatattggccttatgggtgaaaccaagtacagacgtctgacccggacaactccgttttcggatgatgaactagctggatttatcagcaggcagatggttgaaacgcggcagtcaaccaaggctgtggcggcgctgctgaaggaggaatttccggaaagcgagatcgtgtacgtcaaggcaggactagcgtctgaattccgagatcagtatgggcttcccaagtgccgcgagctgaatgatcttcaccatgcaaaggacgcttatctgaacattgtcatgggcaacatctaccatgtgaaattcacgagcaatccactgaatttcgtaaaggaattccgcagcaaaaaagaggtgttcaatttaaaacttgagacaatgctgtcccatgatgtgatcagaaacggcgaaaccgcatggataggcgatggaagctggcttgaggcagtgaagaagcagatgaataagaacaatatccgatatgtgcgttactcattcaggagaaaaggtcagctttttgctcagcagccactgaaaaaaggctgcggtcaggtgccacgcaagaaagatcttcctattgaaagatacggaggatataatggcactactgcgtcgtttttctcacttgtcaaatatcactctgaaaagacgtccggcgttgttatcattccggttgaactgatgtattcgcagcgctttgagcatgacacggcattcgctgaggaatatgcggtgaaaatgctcggaaatattgtatcacttaaatccggggattccatcaaatctgttgatttcccacttggcagcaggatacttaaagtgaatactctgcttgagatcgacgggttcagggtaaatctgactaacaaggctactggaggcagacagttgggaataacatcggctatgcccttactggcagataaccacgatacgatttacataaagcgtattcatactatatatggccgtattatggagtgtgaaaagaacaaatcaacttataatgttagaccgcagtatgatatgattacaagggaaagaaatattgaaatttatgatatgctttcccagaaagcttgcattacaccatttaacgtgatattttcatatgcttcaaagatattctgcgacggcagggatacgttcgttgaacttggagttaatgatcagatcaaggttttggttaatatgatcagcgtttttatgacaggacgttcaagtacatgtgattttgaaaagatcaatggtaaaaaaaggtcgttagaaatgagattaaactccaatctgtccaatgcgaagggctacaagtctatacgcatcatagaccagtcggcggcgggactatatgaaaaagcgtccccgaatttgcttacattatga

SEQ ID NO: 165 - DNA, 4056 bp, Unknown
  OMNI nuclease sequence
atggaaaaattttatttaggattagatatcggcaccgaatcggtaggcatagcctgcaccgacgaaaactatcgtttgctcagggcaaaacgtcgcgacttgtgggcggtaagacttttcgacgaagcgcaacccgccgtaaatcgccgcacgaaaagagccgcgcgcagacgacttatgcgaagagaaagaagaatagaccttttgcaggaaattttcgcaccgtacataggagacgacactttctttttgcggttaaacaacagccccttatggcttgaagataaggacgagaaattgagcggcaaatattgtctgttcgccgataagaactataccgacaaggattttcatagggaatatcaaactatttaccatctccgcaaagaactttgcgacggcaaaaagaaagtcgatataaggcttttctatcttgcgatacaccatattatcaagtacaggggacatttcctttacgacggttctttggcggaaataaggaatatatcgaagttgtttgccgaacttaacgacgcctgcgaagaagtttttggagacgatgcaccgtctttcgatatagaaaaggcggaagaattcaaaaagaaagccaccgaaaagaaaggattaaacgataaatgtaaagaaataatcgcccttttcggagtcaaggacgacttgtcgaaaaatataattaagtacattgtcggcagcaaagttgcgccgaaagccgttttcggagagcagtacgccgacgagaagagtttttctttcaaggaagtttccgacgaagagttcgaagggaagagagaaggtttcggcgacgatttcgttctgctcgaaaaaatgagagaaatatacaatttcgtcgcgttcgaaaaggtgcttaacggcaaggaatgtatttccgaagccatgatagatatctacgaaaaacacaggaaggacttaaaaatccttaaatactttattaagaacgaatacggcgacgaagcgtacaggactttattcaaggacgtcgacaaagggaacaattacgccaactatatcggaatggcgaaagtcaacggcaaaaaagtttacgtaaagaagtgcgtgaagtacgacgatttcaaggcgttcttgaaaaaacttttggcgactaagccgaaaagcgagatagtcgacgactatacctacgactatgttatgaaagaactcgaagaagacaggtttttaccgaaaattctcaattcggacaacggacttttcccgaaccagataaatttagccgaactcgataaaattcttgcaaacttaaagaagttctacccggaaaccgccgagattacggaaaaaataagaagtatttttactttccgtatcccttattacgtcggcccgctcaatacctatcacagcgacaagggcggcaattcgtggatggtaagaaaggaagacggaactattctgccgtggaatttcgccgataaagttaatttagccgccagcaacgaaaactttatgcgcagaatgacgaacaaatgtacctaccttagcggtgaagacgttttgccgaagttttcgatactctaccaaaagtataacgtgcttaaccagattaacaaacttaaaattaacgaaatccctttgaccgtcgaacagaaacagggcttgttcaacgacaaataccttgtcgacgcaaaaatgagcgaccgcaagattaaggactattttgtggagaaaggttggcttacggcggaagaagccaaatcggcggtaatttcgggcaaggacggagaacttaccgtttccatgagttcttatatccgactgaaaaagattttgggagaactcgtcgacgagaatttgagaatgtgcgaagatattattctttggcacactcttaataccgataagtcgattgtaaagagccttattcttaccaaatacggcgatatccccgcggtaaggaacaatataggcagacttaacggattgacgggattaaaggatttcggcaggttctcggaaaagttccttacgggaataaacggcggagaagaccccgtcacgggagaaatctatactattttgtcggtgctgtacgacactaatatgaaccttaacgagataattaacgacgacaaatacggctttaagtatgcgattaaggaacataatcttggaataaaccagaccatagaagacgagattgaagaattgtacgtttctcccgcagtaaaaaggggcatatcgcaggctatgaaaatggtggacgagtacgtttcggctatcggcagagctcccgataaaatcttcgtggaagtcacgagagcggacggaacgaaaggcgacgcaggcaggtcggttaagagaaaagataacctccttaaactctacgacagcgtaaaaaaagaaggaatagaagggtacgaagaactacttaaagaacttaaagaaaacgaaaccgatttatctttacgttcggaaagactttacctttactatatgcagttggggcgttgcgcctattcgggagaaccgatagacttagcttatcttcccggcgatacttacgacgtggaccatatcctgccgcggtcgtacacgaaagacgacagccttgacaataaggtgcttgtaaagagagataagaacgcaataaaaggcgataagtaccccataccttatacgttagttaccgataaagcgagaaagttgtggaaagtatggaaagagaaaggtcttataagcgacaaaaagtataaacttctgacgagaaccgaaccgctcggagccgacgactataacgactttatcaacagacaaaaagtctttaccgaccagacgactattgccgtcgcgaaaattctcgaagcccgctttaaggcgagcggaacgaagatagtgtacagcaaggccaagaacgtatccgacttcaagtcgaagttcaatatagtaaaatgccgtgaaacaaacgacttgcaccacgcccgcgacgcgtaccttaatatcgtcgtcggcaacgtgtacgacacccgcttcggcaacgtgagagcgtacttttacaggaacgaggatgaaaacagcttccgcgaaatcaatcttaaatatatgttcacgaccgacaccccgaatgcctggaagacgggagaaacggcgtataccgttatagaaaccttagccaagccttctatggcgatcacacgctactcgtatacgaacaaaggtcaattctacgacgaaaccttgcagaagaaaggcgctaactgttccgctcctcttaaaggtaaaggtccgttaagcaacaccgaaaaatacggcgggtataccggacttaccacggcgtatttcgtcgtcgccgaatccgacggcaaaaaaggcgcgagaatgaagactatcgaagcgataccggtatataaagagtacggaataaaaagcgacgaagtaaaaattaaagactatctcgaaaacgaatgcggactgaaaaacgtaaaactgctcgtcccgaagcttaaaataaaaactctcgtaaaaattaacggctttaacgcctggcttgccggcatgtttaataattatgttattgtccacaatgcaaacgaatggtttaccgataaagataccgacgattacgtcaacggactcgggaaacttatcgaaacggcaaagaacggctctgtagacgaaaacgaagaagagtacgtaataaagacgaaccgcaaaaaagaagttaaacaggtaataaacgccgaaaacaatatccgtctgtacgataagatagtcgaacagacgagcaagaagatatacgaaggaatatcgggtgcaaaaattattgtgaaaactataaaagaaggacgagataaatttgttagtaaaagcgttttaaagcaagctagaattttattgcaaatgataaaatatcttaaatgcaatgccgaattagcaaatattgcagaaataggcggaagtgcgaatagtgggaaattatatacgaacaaggatataacgaacacaaacttcgaaatagtccacgtttcgccctgcggcttaaaaaccatagtcgtaaaagtataa

SEQ ID NO: 166 - DNA, 4056 bp, Unknown
  OMNI nuclease sequence
atggaaaaattttatttaggattagacataggcaccgattcggtcggtatagcctgcaccgacgaaaactatcgtttgctcagggcaagacgccgcgacttgtgggcggtaagacttttcgacgaagcgcaacccgccgtaaatcgccgcacgaaaagagccgcgcgcagacgacttatgcgcagggagagaagaatagaccttttgcaggaaattttcgcaccgtacataggagacgacactttctttttgcggttaaacaacagtcccttatggctcgaagacaaggacgaaaaattgagcggcaaatattgtctgttcgccgacaagaactacaccgacaaggattttcatagggattatcccactatctaccatctccgtaaagagctttgcgacggcaaaaagaaagtcgatatacgccttttctatcttgcgatacaccatattattaagtacaggggacacttcctttacgatggttctttggcggaaataaggaatatatcgaagttatttgccgagcttaacgacgcctgcgaagaagtttttaccgaagacgccccgtctttcgatatagaaaaggcggaagaattcaaaaagatagccaccgcaaagaaaggattaaacgataagtgtaaagaaataatcgcccttttcggcgttaaggacgacttatcgaaaaatataattaagtaccttgtcggaagtaaagtcgcgccgaaagccgttttcggagagcggtacgccgacgagaagagcttttctttcaaggaagtttccgacgaagagtttgaagggaagagagaagttttcggcgacgatttcgttttgctcgaaaaaatgcgagagatatacaatttcatcgcgttcgaaaaggtgcttaacggcaaggaatgtatttccgaagccatgatagacgtttacaacaagcacaaaaaggaccttaaacttcttaaatactttattaagaacgagtacggcgacgaagcgtacaggactatgttcaaggacgtcgacaaggtgaacaattacgccaactatatcggcatggcgaaagtcaacggtaaaaaggtttacgtaaagaagtgcgtgaagtacgacgatttcaaggcgttcttgaaaaaacttctggcgactaagccgaaaagcgagatagtcgacgactatacctacgattatattatgaaagaactcgaagacgacaggtttttaccgaaaattctcaattcggacaacggacttttcccgaaccagataaacttagccgaactcgataaaattctcgcaaacttaaaaaaattctacccggaaaccgccgaaatcacggaaaaggtaaggagcatatttactttccgtatcccttattacgtcggtccgcttaatacctatcacagcgacaagggcggtaattcgtggatggtaagaaaggaagacggaactattttaccgtggaatttcaccgataaagtcaatttagccgccagcaacgaaaactttatgcgcagaatgacgaacaaatgtacataccttagcggcgaagacgttttgccgaagttttcgatactctaccaaaagtacaacgtacttaatcagattaacaaacttaaaattaacgaaattccgttaaccgtcgagcagaaacagggcttgtttaacgacaaataccttgtcgacccgaaaatgagcgaccgcaagattaaggactatttcgtggaaaaaggttggcttacggcggaagaagccaaatcggcggtaatttcgggcaaggacggagaacttaacgtttccatgagttcttatatccgcctgaaaaagattttgggagaactcgtcgacgagaacctgagaatgtgcgaagatattattctttggcacacccttaacaccgacaagtcgatagtaaagagccttatacttaccaaatacggcgatattcccgcggtaaggaacaatatagccgcacttaacggaatgacgggattaaaggatttcggcaagttttcggaaaaattccttacgggaataaacggcggagaagaccccgtcacgggagaaatttatactatcttgtcggttctgtacgacacgaatatgaaccttaacgagataattaacgacgacaggtacggtttcaaggaagcgataaaggaacataatctcggaataaatcaaaccatagaagacgagattgaagaactgtacgtttctcccgccgtaaaaaggggcatatcgcaggctatgaaaatggtggacgagtacgtttctgctatcggcagagcccccgataaaatcttcgtggaagtctcgagagaagacggaacgaaaggcgacgcaggcaggtcggttaagagaaaagataaccttctaaaactctacgaaagcgttaagaaagaaggaatagaagggtacgaagaactgcttaaagaacttaaagaaaaagagaccgatttgtctttacgttcggaaagactctatctttactatatgcagttggggcgttgcgcatattcgggagaaccgatagatttagcttatctacccggcgacacctacgacgtggaccatatcctgccgcggtcgtacacgaaagacgacagccttgacaataaggtactcgtaaagagagataaaaacgcaataaagggagataagtatcccataccttatgcgttagttaccgataaggcgagaaagctgtggaaagtatggaaagagaaaggacttataagcgataagaaatacaaacttctgacgagaaccgaaccgctcggagccgacgactataacgactttatcaacagacaaaaagtcttcaccgaccagactactatcgccgtcgcgaaaattctcgaagcccgctttaaggaaagcggaacgaagatagtgtacagcaaggcaaaaaacgtatctgactttaagtccgatttcaatatagtaaagtgccgtgaaacaaacgacttgcaccacgcccgcgacgcgtaccttaatatcgtcgtcggcaacgtgtacgacacccgtttcggcaacgtgagagcgtatttttacaggaacgagaacgacaacagtttcagagaaaacaaccttaaatatatgttcacgaccgacaccccgaacgcatggaagacgggagaaacggcttatacagttaaagaaaccttagctaagccttctatggcggtcacacgctactcgtatacgaacaaaggtcaattctacgacgaaaccgtgcagaagaaaggagctaactgttccgctccccttaaaggtaaaggtccgttaagcaacaccgaaaagtacggcgggtataccggacttaccacggcgtatttcgtcgtcgccgaatccgacggcaaaaaaggcgcgagaatgaagactatcgaagcgataccggtatataaagagtacggaataaagagcgacgaagtaaaaattaaagattatctcgaaaacgaatgcggactgaaaaacgtaaaactgctcgttccgaagcttaaaataaaaacgctcgtaagaattaacggctttaacgcatggatagccggaatgaccgggaagcaaattttaatgcataacgcaaacgaatggtttaccgataaagatacagacgattacgtgaacggtctcggaaaacttaacgaagcggcgaagaacggctccgtagacgaaaattgggaagaatatgtaattaagacgaatcgtaaaaaggaaattaagcaggtaataaacgccgaaaacaatatctgcctgtacgataagataatcgaacagacgagcaagaagatatacgcaggaatatcgggcgcaagctattatcgcgactcgttaattaaatgcagggacgaattcgcgaaaaaatcgacgctaacgcaggcgaagactcttctgcagacgataaaattccttaaatgtaacgcagaactgtccaatatagccgaaataggcggaagcgcagccggtggaattttgcgcataaataaggatattacgaagataaacttcgaaatagtccacgtttcgccctgcggcttgaaaaccatagtcgtaaaagtataa

SEQ ID NO: 167 - DNA, 4239 bp, Unknown
  OMNI nuclease sequence
atgaaacaacgacaagaatattacatcggattagattgcggcactagctcagtaggatgggcggttacagacgagaagtatgacctactaaaaactaagcgaaaagttaaaaagaatgataaaactaagtcaaagcagtgtaccttgtggggcgtacgtctttttgacgaagcagaaactgcggctacacgccgcatcgctcgctcaacccgtcgtcgcaatgctcgtgcgaaggagcgtcttaaacttctccgcctactttttcgtgatgaaattgcaaaagttgatccggagttctataatcggctacgcgagagtttttattatgaagaggacaaaaatctagtatcaaaatctaagaacactttatttaatgatccagatttcaccgacaaggattactacaatctatacccaaccatttggcatttacgtcaagcgattataaaagcagacgataatgtacattttgatattaggctctactttttagctattcagcatattcttgctcatcgtgggcattttttactagagggcgacataggaaaaggacaagctagttttcagccaatctttgacgtattctatgacgcatgcgaagactattatcgtcttaataactccgctgcctcatccgtagagcgaatcattgaagataagtctaaaagcaagatcgacaagaaaaaagagctgaaagagattctttttattgaagatgacggcgacgaggaggctcttaaggggcagaccgagctcgcagggctactcatcggatcaaaagtctcgctaacgaagattttcggaattgaatctgatgaagattttaagtactctttcgctgaaggtgtctttgaagataagattccagatattgagatggctataggcgctgaaaacatggatctcattagagccgccaaacaagtctatgattacgcaatactccataatctattaaatgggcgcgaatatatttctgatgctatggttgcaaattatgaccaacataagaaggacctcagtgcattaaagcttgcctttaagccattgccggagagctataacaaactcttcaaagaaaagatctatgatgcctctaaaactccgaataaggactttccgatttaccaagcatatataggcaaagctcgtagcgcaaaaggcaagccggctttagtcgggcaggatattttcaacgctcaacttgtcaatctcatggaaagtaggggcattacaggcgagcttcttgatcgtgcgcaaaaaggtgaacttcttccgaaacagcgcggccaggctaagggcactatcccgcaacaacttcaccataacgagcttaaaatcatccttaataaacttacgcaggattacccgagttttggggttgaaaatcagtcagaaagcgaaaaatacaatactcttgccaaaaagattgcttccattcattctttctgtatcccgtactactgcggcccaattgttaagcaaaaatacgatgagcagggcaaattgattccaggtgggaagagtcagttctcgtgggctgatgaagaaattactgagctcgtgcgtccgtggaactttgatcggctagtcaataaagatcaaagggctacaaatttcattcgccgcatgactaatgagtgtacctatttactcggtgagaatgttttaccgaaatcatcgctgctctatcaagaatatatgcttctcaatgagcttaataatttacgcatcaatggccagcgtatcgataatgagttgaaaaagactatcttcgaacaaggctatctcgcgggagaactaaatggtaatattacaatccatagtctcgagcgttggcttaagaacggatttattcgaccagatgacgagcttagtggagcaagtgaaacaaaatatttaccgaaactccaaacctatcaggattttcgcaaaattctcggtgaagactttgaaaagaaatatagtaataaacaacttgaacgcgtcattgaagctattaccattcttggcgacgaaaaacagatgcttacgcggcgcatcaggagcgagctgaattgtagcgaagaagtcgccaaaaaactcgctaaacgctcatataaagattgggggaaattttccgcaaaattcttgaatggtattacagtcaataatcaaacgatccttgattggctatgggatgacaataaaaatcttatggaattacttggccaggaagttggtttcggaaaagtggttgaagaatacaataatttaagcggcaaaaaacctgaagctggagctaaaattcattattccaatattcaagatttgtattgttcccccgccgttaaacgttctgtttggcaaaccgtcaaaatcgttgatgagctagctaaatcgcaaaaacacgcccctacgaaaatttttatcgaagttacccgcgacgaagatatgaaggcgaaggggaaatatactctagcgcgtaaaaaggatcttgaagcaaaactcaaaagcattaagtccgaagaagctcaggaaattcttaatgagctttcaaccaaggaagatcgagaactccaaagtaaaaaacttttcctctacttttcgcaaatgggcaaatgtgcttattccggtgaacccatcaatctagacgagattaataactctagcctctatgatatagatcatatctacccgcgctccaagacgaaagatgatagtattacgcgcaatctagttctagtcaaagctgaattagatcgcgaaaaaactaacatctatccaatttccggcgagattcgcggcaaaatgtctaggacatggcaactttggtatcgctttggtctcattacaaaagagaaatacgaaagacttactcgagctaccgagcttacgacggacgaacttggcggctttattgcacgtcaaatcattgaaaccagtcaaacagttaaggctatacgcaatcttcttcaaagtgcttatccagatacgaaggtgatctccgtaaaagctggccaagtatctgacttccgacatctgttcgcgaacggaattaaattcagaaactctgaccagtataaggtgcagcctcgtccagaatttatcaaagttcgcgagctcaatgattttcatcatgccaaagatgcttacctaaacattgttgttggcaatgttatgagtagcacttttacggacgacccgtatagctggattaagaaacgcgaggggaaagaatattctgttcgtccggaattattattccgggcatctgaagagtatcaaaaatccgacggcaggattacacattacccagaagttcagaactgggatttcgctaactcaatcaacctagtcagcagtactatggcgcgaaatgatatcctctggacgcgtatgaactatgtagaaagtagtgaaatctctgatctacaaattgttccgcactccgataagaccgacggcatccttccgatcaagcgagatagtcggcttgctcagattaacaaatacggtggctataattctatcaaaggagccttcttcgcgctcatagaatgcaacaacaagaaaggagagcttgagcgccgcatcgtttcaattccgcaaatttacaaagacaaagttgaccagttcgtaaaaaacaagtatcaaggtggtaaggttattttgtcaccgatcaagtataagtcaaagctaaaaatcaacggttttccggttcacctagcgggaaagagtagttctggtctcgtgctatataacggactccagcttttacttgagcccgacgaacagagatatttaaagcgggtattaaaagctatttctaaaagacagcaaataagaggagggcgtcaaaaagaccagagcaaggatggtatctctcgcgaaaataattctatgattatggaggcgatctgccgaaaactagcattatttaacgccatgcccggttttggcgaaaaagccaatacgatcagagcttgcgcgggcgatttttcgaagctagcgttggatcagcagaccgatgctatttgtaatatggttaaaatcttaagatgcaatgccgagactggcaatatctcaagttttgtcccgaaggcctcattcttaggcaagggcacaatgccagaagatatcacgcagcgctacgagaatatttttcttataagccaatccccggccggactttatgaagaacagattgacctgaaaacaatccatcctcaaaatttgaaaaagaaggccgactaa

SEQ ID NO: 168 - DNA, 4107 bp, Unknown
  OMNI nuclease sequence
atgggaaagttttatatcggtctcgatataggcacgaattccgtcggtatcgcgtgcacggatgaaaattataacctgttgcgcgcgaagggtaaggatctttgggctgtgcgccttttcgatgaggctatgcctgcgagcgacagacgcatgaaacgcgcggcgaggcggaggcttatgcgtcgtcggcagcgtatcgcgttgctccaagagctttttgcgctgctcatggctaagaaagacgatactttctttgtgcggctcaataacagtccgtatctcatcgaggataagcgcggcacggacagtaagtacgttatctttgccgacgacgattataacgatgcggatttttatagggattatccgacgatctatcgtttgcgccgtgatcttatacatggcaaaacacaaaaggatataaggctgtattacatagcgatccatcatatcctgaagtatcgagggaattttctttacgaggggcagagcctttcggatgtgcgcgatgtaagcagattattcggagatctgaataatcaatttgatgcgctcgggaacgaaagtgcggtatacttcgatgaaagcaaactcgaagagttcaaaaagatagcgacggaaaagcgcggtatcaatgcgcggaataaagaatgcgaagaacttttcggtaagatgtctgccgaaatgaaatcggcgataaaacttctgctcggaggaaaagtcgtactgtcaaaaatcttcggcagagaacctgccgaaggagagaagtccgtaacgttcaaatctctcgacgatatcgctttcgagacgcttatgcaggatttttcggatgacgaagcagaagtgcttatttcgcttaaaaagatatacgataacttaacgttcgaaagcgtgctcggcgggtatgagtatatttccgatgcgctcgtcgatatgtacgaaaagcataaggcggatctcaaaaaacttaaagacctgctgcgcggtcataaaaaattatatcacgcaatgttccgatacgtagtgcgctccgacggggaaaaggagaacaagtcggaagataaagaaggaaagaaacagccggcgaattatgcttcctatgtcgggtatacaaaaacaaacggcaaaaagatcgcatgcaaacgctgcgtgaaagtgaaggatttttatgattttgtcaaaaagatgcttaccgatcatcgcggcgaactggataacgacgcgctcgcggatgagatactcggtgatatcgagaacgaaacgttcatgccgaggatcctcaacgcggataacggcacgttcccttatcaggtgaacgaacaggagctgaagaagatactcgaaaatgcggagaaggatttccccgaattccgcgaagtgagcgaaggctgtacgctttccgaaaaaatactttcattgcttcggttccgtatcccgtattatgtgggaccgctcaacacttatcatgaagataagggcgggaacagctggatggtgcgtcgtgccgccggcaggatcacaccgtggaattttgacgaaaaagtagataagaaaaagagcaacgaaaagttcatgcgccgtatgacgaataagtgttcgtaccttcacggctgcgacgttctgcccaaatgttcgatcttatatcaaaaattcatcgtcctcgatcagctcaataaattgcagatagacggcgagcccgtttccgttgcattgaagcaacgcattttcgacgagctgtatatgacgagaaagtcggtatccaaaaataatatcaaagattatcttgtaaaaataggacagatatccgaaaaagaaaagaaagataccgatgtcaagtgcggcgcggatgacttcaaagcttcgatgagcacgtatttcacgttgaaaaacatcctcggtgacctcgtggataaaaacgagcagctttgcgaggatatcgttctttggcatactctcaatacggataaggaaaacgtcagggaacttatcgaggaaaagtacggcgatatccccgaagtcatgaaaaacataagggcgctcaaaggccttgtattcaaagatttcggcaaactctcgagagagtttttatgcgaactgcccggcggcgtggacgaaaacacgggcgaagtatatactatcctcggtgaactgtataagacgaataaaaatctcaacgagcttttatgggcggatgaatacagtttccgtaaaagtatagacaaaatgaacggagcagcgtctcccgatgtgacgtatgaagacgtcgaagagctttatgtttcccctgcggtccgtcgcggtatctggcaggctctccgcatgtgcgacgagtatgtagaagctctcggcagaaaaccggacaaggtgttcgtcgaggtcactcggtatgacgataaagagaaaaagggcaaaaagcagaaaagtcgtaaggaggagctcgaagagttatataaacagtgcgacgggatagacgatcttaaagcacggttgggcgcaaaaaacgatgtcgaacttcggcaggacaggttatacctctatttccgtcagctcggtaaatgcatgtattcgggggataatatagaacttgacgcattgatgagcgatcaatacgatatcgatcatataataccgcagtctttggcaaaagacgacagttgggacaacagagtccttgtcaagagcgaactcaaccgaagaaaaacgaacgactatcccgtgccggatttttgccgttcgtcgggagcggtggcacattgggaagttcttaaaaagaaaggtctgataagcgaaaagaaatataaacggctcatgcgacgcaccccgcttacaaatgaagaactcgaagcttttgccgcgcggcagatagtgtttacgggccaggcgagcaaagccgtggcagagctgctcaggcgcaaatacaagacggacggtaaaaaggtcgtatattacagtaaagccggtaacgtgagcgatttccgcaaagatcacgattttatcaagtgccgcgatacgaacgatcttcaccacgcgcgcgacgcttaccttaatatcgtcgtcggcaacgtgtacgacgcccgtttcggctcattgtatcgcgacttaaagcgcggcaagccgatcataagcaataatgcggaaaagaagctgttcacttatactatcccgggcgcatgggataaagataagagcatggctgtcgtggaaaagacgttggcaaaacccagcatgtgcgtgacgagatacagctatatatctaagaatgtcttttataagatcaatcctcttagcgcaggggcgagcggtatcagtgtgccgaggaaagaaacatttcctttgaataatacggaaaaatacggcggatatacaggcttgtcgacagcatattttgttttgatcttatctaaaaatatgcgaggtaaggagataaaaaccatagatggcgtgcctgtattgatcgaatacaagacaaaaggcgatattaataagcttgaagaatattttgccttaaatgacaaatacatagagcccaaaatattattgaagatcaaaaaagattcttgtctaaagtatggcaaagcgccgattatcctaactggagtagccgataatgcaagacttagtatgcatattgcatttgaatggtttgcaagtgcgcgaatagataaatatgtcaaagcattgacgaaatgtcgcgaatttatcgataagggatatttcagcagatctgccgaaacatatactgtgaataaaagcagtatatcaaaaaacggagtagttatagataggagtgcaaatatcgaattatatgatatcatattaaaacagctttcgcgcgatgaatacgatgtcggtaatattaaaagtttattggataatttgacagaacagcgtaagttatttgcatcattgacatgttatgaacagataaaattgcttattgaattaacaaggatattaaagtgtagaagtaaagggaagcctatagatctctctttattgaatattaaatatgttgcgcctcgtattaaaaagaacatcagcaatgttgatgtatttcttgttaacgattctccttgcgggctgcataccgttatccgtaaattgtga

SEQ ID NO: 169 - DNA, 4266 bp, Unknown
  OMNI nuclease sequence
atggataaagtggacaaaaatttttatttaggattggatatcgggacggacagctgtggttgggctcttacagatgaggattataatgtcgtcagagtgaaagggaaaaaggcctggggtgttaggctttttgatgatgccgaagtggcaaaagagagaagaacaaaacgaacagcaagaaggcgtcttcaaagaaaaatacttcaagcggaatggctgagagagattttttcgaatgaagttgaaaagactgacccgaaattttttgataggcttaaatatagtaatctttttagagaagataaagagttgatgggaataaacagtaagtattcgctgtttaatgatgtgttaaaacaagtttacacagacaaagaatattatgcaaaatatagaacagtttatcacttgcgagaagagttattggaaaaacctgcagatgatataagacttttgtatcttgctgttcatagctttctgacacacagggggcacttcttatatgaaacggcggaagcggataaaatagatataacagcaatgtataacgatgtcctttcaaaacttaacgaactagaatttgaaaatggacaaatttttagcttgagcgaggttgaagaaaaggtatttaccgatttattggagaactttaaggaagggctatctctaagagaaattaaagaaaatttttccaataatattggggcgaaaaacaaaagagaaaaagaccttgcaaaaattattatctctggcaagttcaagttgaaggacttgtttgaagtggataaggaagataatattgatgttgatttttcaagtgaaaaatatgaacaagaaacttatggaaaaatctcggaaattctgggtgatgatgagaaacttgctatagtggacaagttccaaaatatttactcatctattcaacttaaaaaacttcttggagaacataagtatataagtcaagcaatggttgcgaaatatgaacttcacaacaaacaactcaaagaattcaagaattttatttcaaaatattatccttcaaaaaagtcatacatatttagaaatgctggcaatggtgataaacttgttgtaaacaactatgctcattatgtttatcagacattaactggtgggaagaaacaagtaatgcaaaaacgagcagcaaaggacaatttctattcatttgtaaaaaagattttggagcaagagccagaaatccctgttgatcaaaattttgaggaatataaagaatatgttataagccttatggataagggtgaatttttgcaaaaaattcgcagccatgataatacagttttgccaaatagtctttatatgtctgaactgaaaaagatacttgaggttagtttccaaaaatttgattttttaaaaactatagacgaaacaggactcagtggaaaggaaaagattttgcaaattatatcctttagagtgccatattttgttggacctataggggattcaaaaccagaatttagttgggcggaaaggaaagaagatatgtcgcttcgtccatggaatttaagcaaaattattgacttaaacaaggcggaagatgggtttatccagagaatgacaaataaatgcacttatttaaaggataaagatgttttgccaaaagattctattttgtattccaagtttagagttcttaacgaactaaataacttgaaaatagatggcaattcaatttcggtcgcagttaagcaatctatatttaacaatttatttaaaaaagaaaagaaagtttcgactaaaaaacttttgaactttttagcagcagagaatgtaatttctgctgatgatattaaaaatgtttccataactgggatagataaagaatttgcaaacaattatgcaagttttgttacattttcaaatagattcggagaggaatttgttgagaaaaatattgatatctttgaaaaaattatcaaatatcacacaattatatccgataaatctcggctgcaagaaagaataaaaagagagtttgatattttcactgatgacgatataaagtggctgaagtcgcttaacttttcgaaatggggcagactatcaagagagtttttggaggaaatactttttgccgataggagaaagcaagaagacttgactgtaaaagaaaattttagtgatagatatgttgaaaaacttgataatggtgaagtctattccgttattgaagcattgtgggaaacaaataataacttgcaacagttgtttgatagaaccaactatacacttggagatatgattgagcagactgagcaaaagcttggacgggatttgacttatttggatgttgatgaaatgtattgttcgccagcagtaaaaaggggtgcgtggcaagcaataaagataataaatgaaataaaatctgcgattggaaaatatccagataaaatatttgttgaggtaacgaggcatgacagtgtaaagggagaaaagggtcgaaaagattccagaaagagaaaccttgagaaattatataacgattcgaaacttaaagaaatgtgcaaacagtttagtcttgaatacaacacgcttataaatgaacttaacaaaagtgatgtatcaaatcttcgcagcgacaaattgttcctttatttcttgcaacttggcaaatgtatgtatactggtgagccaatagaaattgccgatttatatgatgacaataaatataacgtggaccacattattccacaaagtaaaattaaagatgatagtcttaacaataaagttcttgttaaaatgattgccaataaggaaaaggataactattatccaataagtgatataaaaccagagtggcaaattagacaaaaacatttttggcatatgttaaaagatagggggttgttgtctgctgaaaaactttcgagactggaaagaacagagccatttaatgagagggaagagattgattttgttaataggcagttggtcgaaaccaatcaagaatcaaaagcagtcatagaccttttaagaaaagttgttgataatccaacagatattattttctcaaaggcaaatgctgtaagtgattttagaaaaaaatacgaaatatataaatcaagagaagtaaactctttgcaccatgcaaaagacgcttatcttaatgtagtcgtggggaatgttatatataacagatttacagcaagattttgggatagaagagataatgataaaaattcaagagaacatgtaacaagaaattatactaaattattcgaaggaaatgtttggtcatgcagaggagataatcttgtatggaacaaggatagagatcttactagagttaaagctcaatgcgaacaaaataactgtatagtatctgtgatgccatatgtaaacagcaatggaaaattctacaatgatacagtttataagagtaagaaaaaagacccaaatacaagtgcaagttttgctttgaaaggtgaaggaaaacttttgagtgatatagaaaagtatggtggctacaacagccttagcggagcatacttcatggttgtcgaaagtgaagggaaaaatgggaaaataaagaaaactattgaaactgtgcctatcataattgaatataaatatagaaatgacccagacaagcaagaaaaaataataaaataccttgaggaacagaataacataaaaatcacaaaagtcattatgtctgtccttaaatacaaatcaactcttaatataggtggcggactttatacattgacgggaaagaccaacaattcgcttatgatttcaaatcaaattcaatggcacattaacaataaaaatacagcatatgttaaaactctcgaaaaatatctctcaatgtctgactcaaccaaggagaaacttgcaaaagctgatgactacattgttgtttccccaggcatcaaagataaaactcaagaggttagaattacaagacaggagaatattgagctatatgaccttgtcattagacaacttaagaaaaaaatatataacataagttccatcaaaggagtgctgaatactttggaaaattcaaggagaaaatttaatcttttgaatttagacgaacaagtaaagcagttaaacaatattatccggtatcttggcgggagttattcagtcgatttgattcttcttggcggagttgggcgagcgggggcaacgacaataggtaaaaacatcactgacctagatgtaaaggtgattgttcaatcggcatcaggattaaaaagaaaggaaataaagttataa

SEQ ID NO: 170 - DNA, 4236 bp, Unknown
  OMNI nuclease sequence
atggcaaaatatcgtataggacttgatgttggtactaattcaattggatgggctgttactgatttaaataataaattaataatgaaaaagggaaagaaactattaggtgttttaatgtttaaagaatctagcggaggagataaagatcctaataaattaagaagaacctatcgttgctctaggcgaagaattagaagaagaaaagaaagacttaattatcttaacgaaatatttgcaccagaaataaataaaattgatccgaccttttttgaaagacttgatgaatcgtttttaaaattagaagatcgcaaatataaagataaatatactttatttattgataaaaattttaatgataagacctactttaaaaaatttaatacgatatatcatctgcaaaaatatttaatggaatcggagaaaaaagaagacattagacttatttatttagcaattagacatttaataaaatatagaggaaattttttaaattcatctaatcctgataattattcttcaaaaattgatgaattagattttttggaaaggctaacaagagtatttgagattataaatagttatgaaatttatagtaaatttaataaacctatattagatattaacgatataaagtctttaattaaagcaaataaagatagtaaaggtattaattcaaagaaggaaaattttataaaaatttttaataaagaagaaaagaaaaataacttgattgatttcgttgcttcattacttgctgggagtagtgttgaactaaataagattctaaaaaaagatgaagatggcccacaaaatagtattaagatttcttttactgatgatttaaccgaaaaatttttagaattaagatcagaatatcctgaatatgatgattttatttcttccatagaagatttatatcgattataccaggctttatatataaataaatacgtacagaatagtttgccacaaacaatggttgaacgatttaatacttacaaaaccgatttaaaattattaaaaggatatataagaaaatattattctacaaaatatgatgaagtttttaatagtattgaaaataaaatgagctacccacatttagtccgacattattgtagcgacattgataaaaaaacgaaagttaatatctccaatgataaaagttttagtagaattgaatttattaattatttaaagaatgaatttagttttgatcaagatgatgaattaaccttgaaattaaaagaaagaattaattcggatgattttctactaactcaaagtgataaaagtaatggtaattttccatatcaattaaattatttcgttttaaagaaaataataattaatcaagaaaaattctattctttttttgatgaaaaagattctaatggatatgttaataaagataaaattatatctttattaacttttaaaatcccatattatattggtccattatcaaataattatgatgaaagtgatgaaaataatcatgcttggattataagaaaaaaagaaggacatattagaccatggaattttgatgaaattgttaatgtagaagatagtgcaaaaaaattcatacaacgtatgcaaaataaatgtacttacttaattaatgaatattgtttaccaaaggattcaataacgtttcaaaaatatttagtttatcaacaattaaatacactatatgttaatggtaagttttattttaatagtgacaataaggatgatttaataattaatttatatagtaaaaatcgtaaaattacgaaaaagttgttacaagattatttatctaataaattaaaagaaaaagttgttataacctataaaaatggcaaagataaagatgttgaaccgaatctacattctttatcttccttatttgactttattaaagtatttggcagttatgaagaagttgataaaaatattgatttaattgaaaatattattcgtgatattgcgatatttgaagataaaagtattttagctagtagattagaaaacgaatataaattaaataaagatcaaattaggataattaaaagttttaattacaataaattttcgagattaagtaaaaaacttcttgatggtataaaaccttttgataaaaatggagttttgattaataaaacaatattaaccatattaaaagattatgatggttcagaaaataaaccagctacattaatggagatattaaatagtaaagattctgaatatgattttgattctgtaattaaaattgaaaatagtaaagaagaagaaaatgagagtgtcgactcttttatagaaaattcttatttgcctaaaatttctaaaagacctactattttaacttgtagaattatagaagaattagctcatgctttaaaagctaatatttcagaagattttgagttttatattgaatgtgctagaactaataaaagtgacaaaaaagcaacaaaaactcgttatgaaaaattaatggaaacacttagtaagagtggcttgaaatctcaagttgattctttaattaatgaattaaaaaaatatgaaaatgataagtctaaattaaatgctgaaagtttatatttatattttatgcaacttggtaaagatatgtatactggtgatcaaattgatttaaatactattattgaaaattatgatgttgatcacattattccacgatcattaataaaaaatgattctttagataataaagttttaacagaaaagaagtttaataatggaaaaagtaatatctatccattatctaaaatagatttatgggaatataatggtggtagaaaaaaagccttagaattttataaaaaacttaaagataataatttaatttcagaaagaaaatatattgccttaacagctaatacagatcttgataatgacacattagaaggctttgctaataagcaactaagtacaaccaatcagtcagtaataggtttgaaagaggtgtttgaagattattatagtattaatagtgaaaacattattttatctaaagccgaaaatgtaagtgattttagaaataattttgatttggttaaatctagaactgctaataattttcatcacgctcaagatgcttatttaaatatttttgttggcagcgcagtaaattcttggattaagaatatttttaaattatggagaattgatgaaagtaatgaacataaatatagtgattttgtttctttcgttagagaaaaaaggtatacattaaatccaattaaaatcatggaaaaatatgttaaagatcaaagtgatgaatttaatgaattaaaagatgttatttataattataagtttattttcacaaagacaagaacatatattaaaaaggatttttttcctaaatcaacagtttatgcggcaaatagttgcgctaatattaatacaaaaaataatttagattgtaaaaaatatggtggttttaaagaatatgcttttggatactacgtcttaataaaaactaaagacaataaattcatattagaaccagtcccatatatatttagtaagaacgcaaatcaatatttagataatttatataagaaaaattatgaaatttatttagataatgtaaaaattaatactaaatttcaaattgaaaaaagacaatttattattactggtaaaacagttaattcttatctcgttcgaaattctatagaaagattttttccatatgatttaattaaaattattaaaaaagtcgataattttatgaattttttaaaacttaataaaattgctattaatgtaaaaaatcaggaatcaattaataaagctattgatgatttaaataatttacataaaataaaagacaaaaataatgaattaatatctaaagaaaataaatttggtgaaatcgaaactctaacttctaatgaattaattaatgtttttgattacttatttactttgtatagtaaagatgcattttcgtattcattctctaaagctttaatatatgaacaagaagaactaaaaaataaatttatgaatttagatattttacttaaaacttatacaattagtgagatgttaaactatttaaaaactaatgaaagaaaaaaaataaatttaataaagcttgataaagaggaaaattgtggaaagcttactcagaataaagttttgcctttaggcactaagataatttttgaatcaaacacaggattatataaaaaggaaattattttaaaataa

SEQ ID NO: 171 - DNA, 4236 bp, Unknown
  OMNI nuclease sequence
atggcaaaatatcgtataggacttgatgttggtactaattcaattggatgggctgttactgatttaaataataaattaataatgaaaaagggaaagaaactattaggtgttttaatgtttaaagaatctagcggaggagataaagatcctaataaattaagaagaacctatcgttgctctaggcgaagaattagaagaagaaaagaaagacttaattatcttaacgaaatatttgcaccagaaataaataaaattgatccgaccttttttgaaagacttgatgaatcgtttttaaaattagaagatcgcaaatataaagataaatatactttatttattgataaaaattttaatgataagacctactttaaaaaatttaatacgatatatcatctgcaaaaatatttaatggaatcggagaaaaaagaagacattagacttatttatttagcaattagacatttaataaaatatagaggaaattttttaaattcatctaatcctgataattattcttcaaaaattgatgaattagattttttggaaaggctaacaagagtatttgagattataaatagttatgaaatttatagtaaatttaataaacctatattagatattaacgatataaagtctttaattaaagcaaataaagatagtaaaggtattaattcaaagaaggaaaattttataaaaatttttaataaagaagaaaagaaaaataacttgattgatttcgttgcttcattacttgctgggagtagtgttgaactaaataagattctaaaaaaagatgaagatggcccacaaaatagtattaagatttcttttactgatgatttaaccgaaaaatttttagaattaagatcagaatatcctgaatatgatgattttatttcttccatagaagatttatatcgattataccaggctttatatataaataaatacgtacagaatagtttgccacaaacaatggttgaacgatttaatacttacaaaaccgatttaaaattattaaaaggatatataagaaaatattattctacaaaatatgatgaagtttttaatagtattgaaaataaaatgagctacccacatttagtccgacattattgtagcgacattgataaaaaaacgaaagttaatatctccaatgataaaagttttagtagaattgaatttattaattatttaaagaatgaatttagttttgatcaagatgatgaattaaccttgaaattaaaagaaagaattaattcggatgattttctactaactcaaagtgataaaagtaatggtaattttccatatcaattaaattatttcgttttaaagaaaataataattaatcaagaaaaattctattctttttttgatgaaaaagattctaatggatatgttaataaagataaaattatatctttattaacttttaaaatcccatattatattggtccattatcaaataattatgatgaaagtgatgaaaataatcatgcttggattataagaaaaaaagaaggacatattagaccatggaattttgatgaaattgttaatgtagaagatagtgcaaaaaaattcatacaacgtatgcaaaataaatgtacttacttaattaatgaatattgtttaccaaaggattcaataacgtttcaaaaatatttagtttatcaacaattaaatacactatatgttaatggtaagttttattttaatagtgacaataaggatgatttaataattaatttatatagtaaaaatcgtaaaattacgaaaaagttgttacaagattatttatctaataaattaaaagaaaaagttgttataacctataaaaatggcaaagataaagatgttgaaccgaatctacattctttatcttccttatttgactttattaaagtatttggcagttatgaagaagttgataaaaatattgatttaattgaaaatattattcgtgatattgcgatatttgaagataaaagtattttagctagtagattagaaaacgaatataaattaaataaagatcaaattaggataattaaaagttttaattacaataaattttcgagattaagtaaaaaacttcttgatggtataaaaccttttgataaaaatggagttttgattaataaaacaatattaaccatattaaaagattatgatggttcagaaaataaaccagctacattaatggagatattaaatagtaaagattctgaatatgattttgattctgtaattaaaattgaaaatagtaaagaagaagaaaatgagagtgtcgactcttttatagaaaattcttatttgcctaaaatttctaaaagacctactattttaacttgtagaattatagaagaattagctcatgctttaaaagctaatatttcagaagattttgagttttatattgaatgtgctagaactaataaaagtgacaaaaaagcaacaaaaactcgttatgaaaaattaatggaaacacttagtaagagtggcttgaaatctcaagttgattctttaattaatgaattaaaaaaatatgaaaatgataagtctaaattaaatgctgaaagtttatatttatattttatgcaacttggtaaagatatgtatactggtgatcaaattgatttaaatactattattgaaaattatgatgttgatcacattattccacgatcattaataaaaaatgattctttagataataaagttttaacagaaaagaagtttaataatggaaaaagtaatatctatccattatctaaaatagatttatgggaatataatggtggtagaaaaaaagccttagaattttataaaaaacttaaagataataatttaatttcagaaagaaaatatattgccttaacagctaatacagatcttgataatgacacattagaaggctttgctaataagcaactaagtacaaccaatcagtcagtaataggtttgaaagaggtgtttgaagattattatagtattaatagtgaaaacattattttatctaaagccgaaaatgtaagtgattttagaaataattttgatttggttaaatctagaactgctaataattttcatcacgctcatgatgcttatttaaatatttttgttggcagcgcagtaaattcttggattaagaatatttttaaattatggagaattgatgaaagtaatgaacataaatatagtgattttgtttctttcgttagagaaaaaaggtatacattaaatccaattaaaatcatggaaaaatatgttaaagatcaaagtgatgaatttaatgaattaaaagatgttatttataattataagtttattttcacaaagacaagaacatatattaaaaaggatttttttcctaaatcaacagtttatgcggcaaatagttgcgctaatattaatacaaaaaataatttagattgtaaaaaatatggtggttttaaagaatatgcttttggatactacgtcttaataaaaactaaagacaataaattcatattagaaccagtcccatatatatttagtaagaacgcaaatcaatatttagataatttatataagaaaaattatgaaatttatttagataatgtaaaaattaatactaaatttcaaattgaaaaaagacaatttattattactggtaaaacagttaattcttatctcgttcgaaattctatagaaagattttttccatatgatttaattaaaattattaaaaaagtcgataattttatgaattttttaaaacttaataaaattgctattaatgtaaaaaatcaggaatcaattaataaagctattgatgatttaaataatttacataaaataaaagacaaaaataatgaattaatatctaaagaaaataaatttggtgaaatcgaaactctaacttctaatgaattaattaatgtttttgattacttatttactttgtatagtaaagatgcattttcgtattcattctctaaagctttaatatatgaacaagaagaactaaaaaataaatttatgaatttagatattttacttaaaacttatacaattagtgagatgttaaactatttaaaaactaatgaaagaaaaaaaataaatttaataaagcttgataaagaggaaaattgtggaaagcttactcagaataaagttttgcctttaggcactaagataatttttgaatcaaacacaggattatataaaaaggaaattattttaaaataa

SEQ ID NO: 172 - DNA, 4524 bp, Unknown
  OMNI nuclease sequence
atgaaagaaaaagccattacattaggactggatatgggaactaattctttgggttgggcggtagtggataatagcacaaatgatttagtttcgtatcatggacatcccatgtggggtgtacgtatgttcagtgaatcatcttcggctgaggatagaagaaagaaaagaggagcccgtagaagatatcaaagaagaaggcaaagaatattattgcttagagaaattttccaaaaggaaatatgtgataaagatccttatttcttttatagaatggatcaagccttttatgtttctgatgataggactgatgaaggaaaaggttatcttcttgaaaatcaaaaggccacaaaagatttttataataaatatcctactatttggcatcttagatacgatttagttactaacaaagagaagaaagacattagattagtttatttagcaattcatcatatattgaaatatagaggtaatttcttgcacgaaggtgatattgaattaagtgctaaaccaaatgatgaattgaagatgtttatcagctgtatttcttcaacatatgaaggtaactttgaaaaagaagaggatgatgataatgcaaattgggataagtattttgttgtcgagcaaattaataatgataagtttattgattcattaatttctataatagataactatttggataggtctaaaaaattaacagaagtagtagacccatccaaaaaaagatatgaattatttgctgatgagttaatacaacttgttggtgaacctaaaaatatattaactgaacttttacctgatgctttatttaaaggtactgtagatttaagcaaaaatcgaatatataaagaaatatataaaaatcaaattgatttagataaaaaggatttaaaaattatttttaattcagatgattttgaaaataaaatttctaatttatcttccaaactgaaagaaatcagtcctttaatagaaggattaatttatttaaagtcaatctataataattattattttaaagactttatgaaaggctatagttctcttagtgaagctttcataaaaaaatataatgaaaataaagaggatttaaaaagtcttaagagctactatgacaagtacttgagtgataaaaagaattctatgtttagagacaataaagttaataataactttgttaactatataggacattattctccaaatgaaaaaaatcctgatggaaaatcgtggagtgagggtgaaataataaaaatagaaaagaaaaaaagtgattattcggaattcttgaataaactaaaagaagatttgagagactctttgaataagtatcctgaagctcaaaaagaagcggatggtttcttaaaaaagattgaagataatactcttttgcaaagactaaataatgctagcaattctgtaattcctatgcaatttaataaaaaggaattggttgcgattataaataatcaaaaggagtattatcctgatttatttactgacagtaatattagtcatatcgaacaaatatttagttttaaacgggaatattttataggtcctatagattttgataaaaataataaatcaaagtttagctgggttgttcaaaaagaaacagctttaaataaaaaacaaaagatttatccatggaatttctatgatgtagttgataaaaaagaaacgcaaaagaattttattcaaagaatgctgaatcattgtacttatttaaaaggggagaatgactattgtattccttcttcatctattagttaccaggcatttgtttgccttcaatatgtcaataaacttcgtgattcaaataataaccttatctcagtcgatgctaagcaacagttatttaaagacttgtttttaagtaataaaacggtcactgcaaaagaaataaaagaatggatgtaccagcataaacttggaaatacagcctctattcctacttgtaactgcaatatgtcaacttatatttcatttaaaaatttaaataaatataagaagtatgaattccttagactcgagcaaataaaagaaatagatgagatagttaaattgatgatgattttctctgataaagaaacacgaaatgatattttaaaaaatgattatcattttgatgatgaagatatcaaacaaataaaaggatttaattataaaaattggggaagattatctgatagatttctaaatgcaataagaattgaatatcacgatgaagaggcaaacgaacatcgtgaatataactctttgaataatgttttgtggtttactaattttaatcttaatgaaatattatttaatccgaaatttaattttcatgatgaaatagaaaaatataatgaaaataaatatattgattttaaagaaagtgatgatgatttcttgaaaaattggatggaaaaaaatgtatgtgtttctcctatttggacaagatcttttgttcaaacatataagttgataaaagaagttaatgaactgttaaaagaagaaggaaaagaaatctcatattattctgttgagtgtacccgggagaataaatctgataagaaaggaaaagaaacatgcagtcgatatgatagattacttaatatattcaaagataaagactttaataaagaagcaatagatcaaggaattaatgtttcaaccttaataaagtcattacaagagaataaggatagcattaataattctgactattttttattgtattttcaacaattaggaaaagatatgtatacattggaaccaataaacgatttagacgaaattggaaccaataaagcatatgatatagatcatatttatcctcaatcaattttgaaagacgattctatttctaacagggttcttactaaaagtactattaatagagactttaagaaaaataaattcttaagtgatccaaattgtggattgaaattacccaaagaagctttctccttttataaatttttatttgataatagtttgatatcaagaactaagtataatagattaactgaaaaagaaatccatgtcgattcattggagtcttttattaatagacaaaaagttgctactgatcaatccactaaggcaattattgaacttttaaaattccttgaaactaataagtactgcgaaagaaataacgagatgagtagagatgaagcaagaaaagaagcagaaaaacatattatttactcaaaagcaggaattgtatctgattttagaaagaaatatcaaatatataaatcaagaatagccaataattaccatcacgcgcatgatgcttatttaaatgccgtgctagggaagacattaaaagaatattatgatgataaaaaaatatatttatttggtgatgaacttaaaaaacgtatacaaaatgatggagaatatacaataaatccagataatatattgagcaaaagagttagagagtctaaagatcatcatattatatggggtggaattaaggaaattgatttcattaaaaataatattcaaaataactttgatattagagagacaatgtatacctattatggaaatacattgattggccaagaaactgtagaaggtaaaaaaggtcaaggaaaagaaacaattaaaagtttaactccaaatggaaataagatggatttgaaaaaatatggaggatataagcaggcttcttatccatatttctatttaattgaaaagaataacggtgaagctatgatttgtccgatcaattcgttttataaagatgatagtaagattgatcgatttattgaagaaaatttctttaaaaaagacaaagagaatacagacaaaggtaagccattatttaaaaagatattaaaattgaaaatcaacaccgttattttatccccaaaggatgataataaacatttaaggaagatgtatattaccggttcaaatcaatttgataaggatttgcgtataaaaaacggatttgaccgtaattttaaaaaagaggatatgagaactatccatatgattacaaaatttatcaaagtatatgaattaaatgattgctttgaaaattgtaatcctagaatagagtttggcattaatgaaaatacaaattcttatattcaattgaaaaatggaaatgattgttttttgattgatgaagacatagagcatctttataactctatttttgaattgtggaataaacctatgtacaatattgcaacaactagaaatttaattgaaaagatatctcacaattatgattcttggtttaaaaatagaattttgtctaaagagcgttttattaacattatttatattttaaatgagatgctaaaatatttgaagaccaatgattcttctaccttaaaactaaaagataattatcttaaagataataaagataataaagaaaagaaagacaaaggaaaagatactggtgttttaaaatttggcattcatttatataaaggtatgaaaattgtatcttattcaattactggttttaagacaaaggttttatataaagtaaaaaagtag

SEQ ID NO: 173 - DNA, 4005 bp, Unknown
  OMNI nuclease sequence
atgacaaaattttataagcgctttacgatcggtgtggatctcggaacgggatccgtcggttatgccgtcattgacggcgagtacaaactggtaaaattgaagggcaaacacgcttggggatcggtgctgttcgacaatgcgcagacagccaaaacacgcagacttttccgcagtgcgcgcagaagatttgcccgtcgccgcgagaggataaggctgttgcagagtttgttggctccgatcgccgaagaacgggatcccggatttttcgttcgattgaaagacagcgcgcttgtttgcggagaaggaacgtttttccgctccaataaatataacttgtttaacggagacgtaacggacaaagattatttcgcaaaatatcctacgatctatcatttacgacgttatctgatgaccgcgacggaaaaagcggatccgagactgatctatcttgcaatacatcatatcgtgaaatacagagggcattttcttgccgaaggacaaagcatagacgcgggcggaaacaatctggaaggatcgttggtcaggttttttgaagaacttgtaaacgtcggcgcggatctgcattatatcggtaaaaccgagaaactcgcgcaaatccttaaagacaaggctaagccgcgtgctgtgcgtcttacggaggcgatcgggctttttgccgacagcggatacacaaaatatgcaaagtctgcattcggagcgatgctcggatatacggtggggctgtccgacgcagtcgacgctgtcgcagataccgaagaacgtacggaaggcaagatatcggacgacaacggcaaggacgtcaaattctgtttttccgctgccgattatgatgagaacgaagagggatatctcggggcgatagaggacagatccgcactgttcctgttgatgaaagaagtatataccgccgttatgtacgacgtcatactgagaggaaagaagacgatcagcgaggcgatgacagaccgctgggaaaaacacggaaaggatctcaaagcgctcaagacggtatttgccgccaatatgactaaggaacaatacaaggcgtttttcagcgggacaaaggatgtcaattacgttcgctacataggcgataagagcaaaggatggttcaaggacagggtcagcgcggaagatctcggaaaacaggtcaagaagctgctcgaagagatgccggacagcgcggaaaagtcttattgtctttcggagatagacaaagaggacttcttgccgttgatcaactcgacggtgaattcgtatattccttaccagttcaacgagaaggaattgaccgcaataatagacggacagagtaagtattatccgcaacttgcacaggagaaagacaaaatcgtttctcttttgactttccgtcgtccctattatgtcgggcctcttaaaggcgataagttcggatggtgcgaacagcaaatcgacggcttggtcacgccgtggaattttaccgacaaagtggatacggatatcctggcggagaagttcatcacgagaatgacgtcgaagtgctcggtctttaacgatgaggacgctttgccccgcaattcgatcgtctatcaggcgttcgccgtactcaacgagctcaacaaaataaagctgaaagacagagatccgctgcccgttgagtggaagaaagagatgtttctgactctgtgctgcgccaagcgcaaggtgagtaaaaaggatattgccgtatacttgcgccgtaagtacaacgagcctatcggcgtggacgagatcactggtatggcggaagaccgactcacggcgaccatgtctgcattgtgcgatttcaggtcgattctcgacggcaatttcgacaagacaaaactcgacgcgtatgaagagagctttcggatattgactgtctttgaggacaaagacatgaggacaaaacgtcttcaaaggcaaaatatctataccgacgaacaagttaaaagactggcgtcgctgcgttatacgggatggggctctttttcgcgcagggctttgaccgaggtgcgaggccgcgacggcaaaaacgtgctcgaaacaatgtacgacaccgacatgaatttcaacgagatcagattcgataaggaactcggttttgcggaagaattgaacggcgaaggcgaggtcatcgataaattttcttacgacgagctcaaggacctgcgctgctccccgatcgttaaacaaagcgtatggaacgcaatgcgcattgtcgaagagctctgcgaattggcggggaacgatcccgaagccatctatcttgaaacgacgtttgaggaaaggaacaagaagtctacgagttcgcgcgtgcaaaacctgctcgatttgtacaaatcgataaaaaacgatacgtattttaataaggaatgcgaagcgaacctgaaaaaactcgataagcgagaccgccttgacgatgacaaagttttcctgtggttgcttcagttgggcagatgtatgtatacgggcgatccgatctcgttccaggatcttcccaactgccagatcgatcatatagtcccgcgttccgttaccccaaacgatagtttaagcaacagagtgcttgtcaccacgtctgcaaatcagataaagggcggtcgattgggcatggatccggggatcgtgcgcaatatgctgccgttttgggagttcttatacggaaaacgctttatcgacagcaagaagttttacgccttgcaaaagacgcaatacggagaagaggatctgaaaggatttatcaatcgccagttggtcgatacgagttatatcaaccgtcttgtcagggaattgttgcaaaagaggtttccaaatacgcatataggcggtatcagacaatctctcaatcatgccatgcgcgtaaaatatgccgagcaaggcaaagccggtttttacaagatccgcggacttaacgatatgcatcatgccaaggacgcttatctgactgccgtgatgggacaattcagagacaaagggtgcccgtcttggggaagtatttgcaaaatgtacctttccgagaggacggacgtcgatgcgcagaatggcaaagaagaggaaaaggcacgcaacgggatagtgctcggattgttcgagcggcatcagaatatcaatcgggacggagaggtggtctgggacaagcctttccgcgacaacgtgttcgaaacaatggcgaccaacgattgcatcgtcgtcaaaagactcaaacgcaaggcaaaatccgcgttctatgatcagactttgtacggaccgggttcggctaaaaagaatctgataccgcaaaagtatcgtaacggagagcctatgccgacggaaatttacggaggctacagcaacgagaacgacgcctattatgttgcggtagattgcggagaagggaaaggcaagaggtataacagatatcgtctgatagggatcccggtagtcgtgcaccaggctcggaatatcgacgggtatatcgggacagtatgcggtcaaaacgccaaagtattattccccgtatacaagtatcagctgatcgaattcaacggtcagaaatgttatattgccggggacagcgaggtgcagaacgcgactcagcttatagtcgatcctcaatacgagaaactgctttggatatgttcaaaggaggagaacagaataagcccgaaagagatagagaagatagtcgagcaaacgccgcgattcatcgaacactattgttccaagatcgacaaattcttccctgaatttgcgaagtttgcgtcggtacttcgtaatatcgcggcggaaaagcttgacgatatggaatggggagcaaagcgaaaactcatcaacgatatgttggtcgtcacccaagcgggagcgggaagaatagatctcgataagaaacttggaggcggatcgtacggcagactgagcggcaagacgatactgcccgataaggtcaaatggatcgaccgctcgatcacaggtctgcacgaaagggtgcgcaaaggagtgtga

SEQ ID NO: 174 - DNA, 4053 bp, Unknown
  OMNI nuclease sequence
atgaaatcatataatattggccttgacattggaacaagctcagtaggctgggcagtagttgaggaaaacacgcaaaaaataatgaaaaaaggaaagaaaacgttatggggtgttagactttttgagcaggcaacaactgctgccggtagaaggggcttcagaaacacccgaagaagatatgatcgcagaagaaaaagaatagaattattgcaagaagagtttaaagatgaaatgaacaaagccgattcaacttttttcactaaattaaaagaatcaaaatataacaaaaatgatttatcaaacaaaacaatagcaatattaaaagaagaacaaaataaaataaatgaatataacaaaaaatacccaaccatatatcatttaagaaaacatttaatagatgacactgaaaaagaagatattagattggtttacttagcattacatcacataataaaatatcgtggtaactttttatataatggtgaaaactttaatgttaataacttaaacatagaggaaagattagaagaagcacttttaaccctggttgaattggctccaaatcttggaattccagaaaactataatgaaattttagatttgaacagaatatcagaaataatagttagtccttcaaaaaatgacataaaagtagaactaaaaaaagaattggaaaaaataagtgataataaaaaattcataagtgaatttattaaattgattactggaaataaatttaatattaaagatttattaatattagatgaaatcgaaaagatgactatcagctttgacgatagtaactatgacgaagaatataatgaattacaagaggtattgggagactcaattgaaattattgattcctctaaaaaactttatgattctgctttcttaaagaaaatatttaagggcagtaataatacaagcctatctgctttaatggtagaaaggtataacacacataaagaagatcttagatttttaaaagaaatattaaatactaataggcaagtatataattctatttttcgtacaaaagacaaaaaatgtctatatgaaaaatacattcataatgaactatcatatgaagagtttaaaaaatacttattaaaacacctagaaacgacatttgataatttaaaggatgttgccataattgaaaaatgtaacaaaaacaaactaagaattgaaaatggtgctttcttaccaagaataacagagacagaaaatggccgatacccatatcaactaaacaaggatgaactaatcaaaataattgaaaatcaaggaaagtattatccatttctattagaaaaagtagtcaacacatataaaatagtaaaactactagaatttagaattccatactatgtaggtccattgaacacaactacaaaattaaaaaacgtaaaaaatagtaatgcctggttagtaaagaaagtgaataatatccagataactccatataattttgatgaaataattgacaaaggtgcaacagcagaacaatttataaagcgaatggtgtcacattgtacatatttgttaaatgaatatgcgctgccaaataaatcaattctatattctaaatataaagtaatgaatgaattaaaacaaattaaagttaatggtgaaaaaattgaaaatgatattcaacataaaattgtaaaagaactatttgaaaagacttcaggaacaattacagatgcaaagttcaaaatgtatctatattctagtgcggattttgacatgtacaatggagatataaatgtaaccggatattctgcagatggaaagtttgccaacaacttacagtcatatattgacttttttggtgaaaatgggattttttctgggacagaatacaaagaaaatgatgccgaacagattattgaatggataactatttttgatgataaggatattttagaagataaagtaagaacagaatatcctgctttaaacaacaaacaaattaaacaaataatagataaaaaatattcaggttggggaagtttatcaaataaattattaactaccaaacactataaagaccaagaaaccggattaaaaaaatcgattctagatttaatgtatgaaacagatgaaaacttcatgcaaataattaacaatgatgagtatgattttcagtcaatgataaaagaaaataatatatttaaagatactgctaagatatcttatagtttagtaaaagatcttgcgacttctccagcaacaaaaagaggtatctatcaagcactaaaagtagtggacgaattagtaaaatatattggttatgaaccaaaaaatattgttgttgaaatggctcggtccgaagataaaaaggaaagaaaagatgatagaaagaaatatttagtaaaattatatgagaagttcaaaggtgaaataaagaattataatcaactgatatcagaaatggaagattatgaaaaaatagatactcaaagattatttctatactttattcaagaaggaaagtgtttatacactggaactccactaaacatagaagatctggataagtatgaaattgatcacatcattccaagaacacttataaaggatgattcactagacaacaaagctttagttctaaaagaatgtaatcaaataaaaaaagcgggcctagtattacctagtgaatatagaacatcacaaaatattgtttggtggactcacttaagaaaaataggattaatgtcagcgtcaaagttttataaactaacaagaaaagcatatagcgatgaagatattcaagggtttatcaatagacaattagtagaaacaaggcaagttacaaagcatgttgccaacatattaaataatttttacaaaaaaaccaaaattgtctatttaaaagcaaatttatcccataactatcgagaaagatatgaattgttcaaattcagagaaataaatgactatcatcatgcacacgacgcatatctagcagcagtattaggcgaatataaagaaaaatatatgaaaaagactcttaattataaaatgataactgaattaaatgcgcgattaaaagaattgggcaattacaacaaattaaaatacggatatgtaataaatagtcttgatagcgatgtaaatgacatagttaatgaaatatcaaaaagttttgtagatgaagaaactggcgaagtattatttgatgcagaaagatttaataagattgtagaagataatctatatagaaatgatattttagtaagcaaaaaaacagaaatcagaactggagagttttacaatcagacaaaacagtcaaagggtagaaaaggagtttccttaaagaaaaatatgccaacagaaatgtatggctcatatacaagtttaaatcctgcttatgctacaatggttaattacacaaaaaatggccaagaaacaagaagaattgtaggctttccaatatatttaaaaagtctaaatgaatttgaaattgaagagtattatagaaaattattaggtctagaaaaagatgaactcattagaatagaaaatattaaaataccattttactcatatcttatatggaatgatcaactttgctatttagtgggagcatcaaataaggcagaagtttgtaatgcaaaacaattcaagtatgataaatattttatgaaaaaacacaaaaaagcactaaatgaaatttttaacaaaaaagaaactaattataatgagtatcataatgatattgatgaaattattacatacatagtggataaaatagaaagtgactataaactttttgaaaatcttgtaccggaattaaagatgatggtaaattataagaaatatgaaaatttcactattgaagaaaaagtaaatatcataaagcaattaacaaaattattaaattgtaaaagtgataatgctagctttaagtttttaaacgaaaaatattcatctgcctttggtaagaagaatggcagaataattgaaagtaccacaattaatagcttttctgtaacggggatattttgcaataaggaaagacaaatatgagttttagaacagtag

SEQ ID NO: 175 - DNA, 3369 bp, Unknown
  OMNI nuclease sequence
atgaaatacagaatcgggctggatatcgggatcggatcagtcggatgggcggtcatttcggcggaagaagcgggtcatcttgccagaatcgaggatttcggaacccgtatttttgattctggtgaagatcctcaaacaagcgaatccctctgcaagcagcgcagaggttttcgtggcgtccgcagattgacgagacgcagaagattcagaaaagaattgctgaagaatcaccttttgaatattggctttctgaatgctacttttgaagacgaacttgcggagtgccgtaatgcggacgtttatcagttgaagttgagaggactggacgaaaaactcagtcccgcagaactgtataaatgtcttgttcatacctgcaaccatcgcgggtatctggaattttatgagccggaagagaacgacaaagaggcgggagagaatctgcgggcggcaaatcggtttgaaagcgatttcagtgcgagtgggaagcgcacggtgtcggagtttttgttggacggtttcagcgagaacgggtttgtaaaataccgtaaccgttccggaggagacgtgccgcatctgctgattcgccgtgagttgctgaagcaggaaattcggcagattcttctgtgccaaaagcggttttatccgtgctggaatgagaacaatattgatcgtgcgttggagataatttttgcgcaacgtgattttgaggacggccccggaaacccggacgatccgacaagacgctatcacggatttctcgaaacgctcgggaaatgtccgttctataaggacgacgctcgcggttttcgcgggacggttatctcggacgtgttcgccgtgacgaacacactttcgcagtatcgttattgcaacgtgaaaaccggtgagttttcactcgaaaaaacggtcgcgaaagagatcgtcgatttcttgcttttgaacgggaaaatcaatctgacagacgtcaagaagattttgacggcacacggcttcaaacttttgaagagcgatctcgcggacgcgaacgcgctcggaaaagccctgaagtttcttcctcttgcgaaaaaagcggtcgaggaaagcggagaatcgtgggaatccgtgattgcggaagaacagttcgacgtaaccgttccgtcccgacttcatcagatcggcgagttgatctccaaataccaaactccccgccgtagaaaagaagagatgaagaaagcaggcgtcgatcctcgtctgattgcggcttttgccaacaagagaatcagcgggaccgcgtcttgcggctaccgttatatgtgcgacgccatagtggcgtttctgaacggggatatttacggatcctatcaagcaaatcggattcaaagcgacgccgagaccgatcctgttgtgaaaagcgtgaaacttgcaccgtctgcgatcgacgatccggaggtgcgtgagaatcgcgtcgttttcaaagcgatcaatgagacgcgcaagatcattaacgcgatcgtggatatctacgggtcccccgaagaaatcgtggtggaagtagcgagcgaactcggcaaaagcgtcgaagcgcgtgacgaattgattaaaagacagagagcgaacgaaaaggagaatgcagaggccaagcgcctgctctctgaattgttgggtattgaagcgaccaaagtttcgccgtctatgattgaacggtataaactgttcaacgagcaagaggggaagagtgcctattcgcaaaaacctctcggcgaattgaaagacgttgttgagaacagagatcgcgtttatgagatcgatcacatcgttccgttttctttgattcttgacaatacgctccataacaaagcacttgtctttgccgaagaaaaccagaaaaaagggcaaagaacgcctttgatgtatttgggggctgcagagcaaaaatcgtttgttgcgtttgtcaaccatctgtacgcacgaaaaaaagatgggatcagcaggaaaaagtatgcgtactaccgttgcgaaacgctttacgggcaagaagcggagaaactgatgaacgagtggaaaacgaggaacatcaacgacacgcggtacatcacgaagtacgttgccggattgattgagcggcatcttctctttgcgggagacaaaaaacagcacgtacaaaccgtgaagggatccgtgacgcaaaagttccgtcgtgaatggttccgggatcagagatggggaagcgacgaaaaggatcgggaaacgtatctcaatcacgcgttggacgccgtagtcgccgccaatttaacaagaccgtatatcgagatcggctccgattctctccggttactttccatcttcaaacgcagtcgcggtcgctatacggaagagtataatgagtatttggaaaaatgcgtttccaagatgaagaagtattacggattcgacgaggattataccagaaaactgctttgccgcgccggtcggattccttctttcgttcctcggttggcggaagaggttgccgttcgttttgtcgtggatcaagaagaaaaggatgaaaaaacgtttaccgaagaggtgaatgctgtatatcgtcttgattcggagtttgtcgttcctccccattttcccgtcacttcctgtaaacaggacaaaaagtttcgggggacgattgccgattccaatcccgtcagagtggagatgatcgacggaacccctcataagatcaaacggacggatgttcgtgagatcaaatcggacgatcttgaaaaactgtttacgacagacgcatctctgcgcacaaagctgggcgagatcttgaacggtaaagataagaattacacggtcggaaaatatcttgacgaaaacgggttgacgcactttacggcgtctgacgggaccgtgatccgcaaagtgtctcttgacggcggcgtcttctcaaactattggagacaggaactcggtgacggaaactataccaatttgagtatgctgaaatactactgcgtggaggtgtacgaagatcaggacggcaaaaccagaatctacggtattcgttacgtcgatctaatccgtcggaacaaaaaactgtatcaaaaagcggatagttatccgtctggatacggaaaacatataatgtatcttttccccaatgatttcgtgcggattctgaacgaaaagaacgagatcaaattcgagggatattaccgttcagtcaagaatatcaatcggtctcaattgtggttaaggaaaccgaataaccgagagatgattgttaaaagcattgctttaagcgatcgcgtatcgcgagttgatgtgtcaattctcggaaaaaagggaggtgagatccgttgttccgtaccgtttccgtctaccggggagaaaaatctcggtaagggataa

SEQ ID NO: 176 - DNA, 3498 bp, Unknown
  OMNI nuclease sequence
atgaaagagtctttgcagtatatccttggactggacatcggcatcgagtctgttggctgggccgtgatccgctgcgccccaacgtaccgcattgaagatgcaggcgtgcgtttgtttgcgaccaccgagcaaaaacaaggcaaaagcaacacaaaccaggaccgccgcatctttcgtgccgcacggcggttagtgcgccgccgcagccaccgcaaggcgatggtaaaacgccatcttgagcgcattggcttgctgcgccccggcgaggtggaagccttctttgaggaaggcggccatgatttgctgcgcctgcgcgtcaaggggctggacgagtgtctttcgccggtcgaactggctgcttgcctaatcaacctgtgcaaccaccgcggctaccgcgagttttatccgctggacgaagaagagaaaaaagaattgaccgccgccaaacgccaggagcgcgagcaggagagccgcggcatcgagcgcgttaaacagatcatggaacagggccagtaccgttcggcggcacagatgcttctgcaggacaagactttcgccccggcggatggcggccctatgcgcgtttaccgcagccatccccacaaggcggaccagtatccgctcagccgggatatgctgcgtaccgaggccgagaagattctgaactgccaaagccaattttacccctgtctgcggcagaattaccagacgctttaccgcaagggcggtgcggaccgccgggtggagatgagcagcacagagttcctgctgcagctcatattcgaacagcgcgattttgaggatggccccggtgacgtcaacgacaagatgcgccgctacaccggctacctgtccacccttggtaagtgccaattctaccacggggaggaccgcggtgcgcgcatgacggcgctgggcgacttgtacgccgcggcgaacgccctgtcccagtaccgttaccttgatacaaagaccggcgagcttgtgctgccgcctgcgcttgcccgtgaactgatgacggccgctttgctggacgcggagctgcccgcaaaaaaaatcaatgacatcgccaagaagtatggtgtgaaagcaaacaacaagggcatcaaaaaaacggagctggctccgaactgcatcaagttcctgcgcgccgtgcgcccggtttttgaatccgagggcattgcttgggcggatgttcttggcgcggacccgctgcaggcgcagctgcagccggattcgctgctcaaccgcatcggccgtgtgctttcccactaccagaccccgcgccgccgccaagaggaactgcgccggttgccgcttgcgccggttgccgccgtaaaggaaacccttgtcaaaaagctggcgcggctgcacctttccggtacggccaaggtctgcgaaaggtatatgagggaagccgtcaacgcctttttgtcgggcgaaagctacggcaatttccaggcgcgactgctggcggaacaggaacgtggccctgcagtacgcgccgcagggaactatgtcaagctgccgcccttccccaaagacgccgattttgccaaaaactcggtggtggcgcgtagcctcaacgaggcgcgcaaggtcatcaatgctgtggtagcgcgatacgggtcgccctgggccgtcaatctcgaagtcgccagtgagctgggccgctcctatgccgagcgcagcgagatcgaaagcaataacaaaaagaatcacgccgcgaccgaggcggaacggaaagcaattgccgagatcatggatattgctgaccctgccaacgtcaaaggcagtatgcttgaacgctaccgcctggccgagctgcaggggtggaggagcttgtacagcggcgcagaatttacggacaaacgcgctgtgcttgacccgcgcagcacccttgttgaagtagaccatattgtgccgttttcgctgattttggataatacgctgcacaacaaggcactcgtttttgccgaagaaaaccgtgtgaagggtcaacgtgtgccgctggaatacctgacggacccggcccggcgcaaggcgttcgtcaagtgggtcaataagctggccgccgataagaagatcagcaagcgtaagcacgaatatttgctactgcaagatctgcacgattccggcttgctggatgaatggaagacccgcaacattaacgacacacgctacattgccaagtatctgcgcggctaccttgagcgtaacctcaagccggccgccgaacaccgcagccaattcgtttttcccgttaaaggcgggctgaccagccgcttccgctgcaaatggctcaatgaaaacacctggggccgcaaagataaggatgaactgcgcaaattgaccacgctgcatcacgcggtggacgcggttattattgccaacctgaccccagccacggcctttattgctgaagccgacttccgtctgcgccgcgtttacaaaatggccggcaaaaggaaaaccagggagtattgggatttgtacaacaaagacctcgacaccttggtcacctatttccactacccgcacgcactggcagagcgcagcctgaatattgagcgcggtggcaaaaacggccttaatattaccgccctgatcgagaggatcaacgaagaagtcgatgttcggttcggtgaccccgggcaagaatcggatccggccgagtacagccgccgcgtggtcgcgttctatcaggatgaccaggcctttgccgctgcattgtgcccgattctgaccagccgcaagcaggagcgcaaatggcaaggaacgctgacgggcggaaacccgctggggtcgatggaagtggacggcgaattgctggggcgcacacgcacggatgtgttgttgctgacccgcaaggacctggaacgtctgtacaccaatgacggcgacctgcgggattcacttgcggctgcttttgcaggggcacaaggcgaaaaaacaaagctgggtgaccttttggcggcgcagggcaagaccgaattccgcactcaaaaaggacggctggtacataaggtgacgctgaaaggcggcgtgctggacaattactatatcaaacagatcggtgcgcacaatcgcagcgtgctggatacgaccgagtattactgcgttgaagtttaccgcgacacaaaaggtcaaacgaaagtgcgaggtatccgccgggttgatgtgacacataaagataagaagctttggctgacctgtccgtatccaaccgattatgcggaacatttgatgtatctgttcaagaatgattacattacggtggagacaaagaacggactacaatttgagggatattatcaaagccctgcggggttgaagcaaaacaagtttaacggaaaggaatgcaattgctccgtaacagttcctttccggatcacgggaacggcaactgtaaagaagctttcgatcgacatccttggccgaaagggcggtgaaatccgatgtggcgcacccttatcgttactgccggagaaaagctga

SEQ ID NO: 177 - DNA, 4389 bp, Artificial Sequence
  OMNI nuclease sequence
aagaagtactttctgggcctcgacgtgggcaccgagaatatcggatacgccctgaccaaggactacgaagtgatgcaagtgaacggcaagcggaccatgggcgtgctgagctttgaatctgccaacaccgccgtggacagacggacctatagagccaccagaagaaggctggaccggcggagatatagaatcgccctgctgcaagagctgttcaacgacgagatcatggccaacgacaagaacttcctgcggagactgggcgacaacgacctgtacctggtggacagaaacgtggaaggcaagtacagcctgttcaatgacaccgacttcaacgatatcgcctactacaagcagtaccccaccatctaccacctgagggaaaagctgatgatggaaggcaccgacgacatccggctgctgtatctggccatccaccacatcatcaagtaccggggacatttcctgctggccggcgaggtgtccacaaatgaagttggcggagtgaagcagctcgaggaactgatcaacaagctgaactccaagctggacgagaacaacgatgagaacaagaacaatgacaatacctgcttcttcgacaagttcgccaccaccgctctgagcgacgtgaaggatctgatctgtggcaccggcgatatcaccaagaacatgctgaaccagatcaccatcggcaagaagtacatcagcaagcgggacaagaagaacaagctcaacgagctgttcggcgtgtccagcagcaagaccagcaagaaaatcatcgacatcgtgatgggcggcaaagtgaacctgaccgagctgtttggcaaagagtactacgagaaagaggaagtcaagggcttcaccatggccgaggaatgggagagcattgaggacctgcagctgatcaaggacaacatcctgcacatcgacattatcgacaccatcaagcagatctacgactgggtcaccctgaacgagatgctgaagggcaagcagagcctgagcagcgccatggtggaaatctacgagacacacaagcaggacctccacgacctgaaagagttcatcaaggattacgcccctaacgactacgagagagtgttcggcgagatcaagaacgagaagggaaagatcgacaacagcatctgcaactacagctgctacatcggcggaggcagatacaacggcgacaagatcggcgccaatggcagatacggctccacatgcacccaagaggacttctacaagtttatcaaaaagatcatcgagagcgtgaccgtggaagaggccaccgcactgagagatgacctgctggaaagaatcgccaacaaggacttcatgcccaagatcgtgtccaagaacaacagcacaatccccttccagctgaacatgatggaactggacggcatcctggacaaggccagacagaaccccaagttcaccttcctgaacgacgtggacaacggctggacaatcgccgataagatcaagagcctgctgtccttcagagtgccctactacgtgggccccgtgaaagagtacgaggacaacgacaacaacaagagatacgcctgggccgtgcggaaagagagcggaagaatcaccccttggaacatcgacgacaagattgacaagaagcagagcaacgagatcttcatcagacggatgaccaaccggtgcacctacctgaagctggccgacacactgcccaagaacagcatcctgttcagcaagttcatgtgcctgaatgagatcaacagcatgaagatcaatggcgacgccatctcctgcaaagagaagaaagccatcttcgataacgtgttctgcaagaagaatcccacaatcaagaacatcaagaagtatctgatcgagaacttcggctatgagaagggcatcgtgctgtccggcatcgacaacgagattaagtcctccatgaagacctacatcatctacaaaaacaagctgggcaacaaggtggacgctgaccccaacatgatcgagcggatcatcttcctgagcaccatccacgaggacagccagatgctggaaaagagcatccgggaagagttcggcgataagctgaccgaggacgaaatcaaggccatcaagggattcaagttcaatggctggggcagcctgagcgccgagtttctgaccggctataagaacaacggcatcaagctgatgttcgacggcgaaatgctggacatcatcgatattatgtacgagtacaacctgaatctgcagcagatcatctttaacgagaagtgcaacttcagcgaggccctggaagcctacaacctggaacacaacatcgtggaagatagcaacgtgtcctacaacaaggatatcgctgactacccttgcagccccagcgtgaagaaatgcgtgtggcagagcttcaagctcgtgaaggacattgtgaagcagacaaagatcgtgcccgacgtggtgttcatcgagtcctgccgggaaaacaacgactttaagaagaaccagcggacctccaagcggcgggatatgatcgtggccatctacgatgaggcccggaagaagattaacgagctgcagagagacaagaaggccgagttcagcatccaagaactggaaggcctgagcgaggacatcgactactgccagaaaaccctggacaactactccgacagcgagctgaagaaagagaacctctacctgtacttcatgcagctcggcaaggacatgtacaccggaaaggccatcgacctgaaccaggtcctgttcggcaatatgtacgaccacgatcacatcatccctcaggccgtgattaaggacgacagcttcaccaatctggtgctggtggccaagaaagaaaacgccgagaagtcccggacataccctctggaaagccagttcagacagaccacactgtggaagaagctgtataagatcggcctgctgagcaatgagaagtacagcagactgatccggcagacccctatcaccgacgaggaacaagagaagttcattaaccggcagctggtggaaaccagccagacagtggttctgctgcgggacctgctgaatcggtacttcgcctccaagaatgtggaagtggtgctgacaaaggccggcaatgtgtccatgttcagaaaagagttcgacctcaccaagagccgggaagtgaatgacttccatcacgcctgggacgcctatctgaacatcatcgtgggcaacatcctcaacaaagagtttaaccacaactggttcatccggcaggataacggcaaggataagagctacaacttcctgagagtgctgcggaagcaggccacagccaacaacaacgaaatcctgaatatcatcgaaaccaccatgaacaacatcgacttccagatggtcaagctccccgaggaaaagaagggcaatttctacagcgaggtgctcaagacccacgagaacgacaaggacagctctctgatccccatgtgcgactctaagatcgtcggcggaaaagaaattcaccccaagtgcgacaccaccaaatacggcggctacaagaccgccaataccgcctactttatcctggccgactccatcgacaagaaaggcgccgtgcagcggaacattgtggccatcagcatcttcgacgacgcccggatcaagaatggcaagatcacctacaaagagatctttgagcgcatcggcctgaaggacggcaagctggctaatgtcgagggaatgaaggtgcccatcattaagaccggcagcctgctggatttcggcgcctattgtctgaggctggccggaatgaccggcaacagactgaccttccacaacgccaatcagctgtttgtgtccaaggaccagaaccggtatatcaaagaactgggcattctggtcgacaaggtggtcaaagagtccaagaaggacaccaaagaggataagaaagaagctatggccctcgagatcattgaagagatcatccggcggaagaacaaccccgacaacaagaactccaacatcattgtcgtgaaccggaaggacaacctcaagctgtacgacttcttcgtgtacaagctgtctcacaacccctacaaggacatccccacctactcttctctgctggatattctgcagcggggaaaagaggatttcgagcagaaagaaatctatgcccaggtgctgctcctgttcaacattatcaaggcctttcagtgcaacgcccaaaaagtggatgtgtctgccctgtcctacgtgaacaagaaggggatcgccacaaaaggcggagccggacagtgctctatcgccatcaatagcgacatcaccgaaatcgacaagctgatcctgatcaaccagagcatgagcggactgaaagagcagagaatccagctcaacctgaaaaaggtggacaag

SEQ ID NO: 178 - DNA, 3270 bp, Artificial Sequence
  OMNI nuclease sequence
ggtaccaccgacatcagatacagagtgggcatcgacgtgggcagcttttctatcggaatggccgccattgccatcgacgagcaggataatcctagcgccgtgctgagcatggtgtccctgattcacgatagcggactggaccccgaccagatcaagtctgctgtgacaagactggccagcagcggaatcgccagaagaaccagacggctgtaccggcggaaacggcacagactgcagaagctggatagcttcatcacaagccacggctgggccctgaaggacttcgaggaataccccgatccttatcacccttggcaagtgcgggccgagctgagcacaagcaagattacagatcagggcgagctgggcgagaagctgtctgtggctctgagacacattgccagacacagaggctggcggaacccctacagcaaagtgaacaccctgttcacacaggtgccccacagctctggattcgtggccgtgcaagaagagttcagcaagctgctgggcaccagctttccagaggatgtgacactgagcgagatggtggtgtctgtgcctacaagctctaaggccctgagaggccctaagggactgctgtctgctagactgcagcagagcgactacgccaacgagatcctgaagattgcccagctgcaggatctgagcgagggcctgaccaaagaaatcatcagacacgtgttcgccgccgagtctcctaaaggatcaggcgaaggactgaccggcaaagaccctctgcagcccaatgagtacagagccctgaaagccagcgacgccttccagaagtatcggatcgccgctctgatcggcaacctgagaatcagcgataagagcggccagcaccggctgagcaaagaacaagtgaacgtggtgttcgaccacctgtgcaacctgtccttcaaagaggaacccagctggatcacaatcgccaacctgctgaacatcgacagaggccaactgctgggaaccgccaagatcaccgatgatggcgaaagagccggcgctaagcctcctgtgcacgacaccaatagacggatcgagggcagcaagatcacacccctggtcaattggtggaagcaggccaacgaagaggaacgggccgctatgatcaacgccatgagcaacggcaaggtggacgactacgatagcgccacaggtgctaacgtgcaggccttcttcagcgacctgcctgacgaggaacacaccaagctggatgccctgtacctgcctattggcagagccgcctacagcgaggataccctgcaaagactgacagcccagatgctggacaacgccctggatctgcatgaggccagaaaggccgagttcaacatcgagaacgattgggcccctcctgctcctgccattggcgaacctgttggaaaccctgccgtggacagagtgctgaaaggcgtggcaagatggctgaaggccgccgaatctacatggggagcccctgtgtccatcaatatcgaacatgtgcgggctgccttcatgagcgagctgaaaaccagagagctggaccgggacaacaagaagagagccgagagaaacgaggaactggtggccgagatgtacaccaacctgaacatcaagggcagacctagagccgccgacatctggcggtatcagagcatccagagacagaacggccagtgcgcttactgcggcgtgcccatcgatttcaagaactgcgagatggaccacatcgtgccaagagccggacagggcagcaccaacaccagagataatctggtggctgtgtgcaagccctgcaacagcgagaagtccaacgtgtcatttgccgtgtgggccgccaagacatctagagaaggtgttagcgtggaacaggccgtggaacggacaagacactggattgccgatcctggcctgaacaagaagcagttcgacgcctttgtgaagtccatctgcaaccggctgacccgcaagaccatcgatgaggaaatcgacagccggtccatcgagtctgtggcctggatggccaatgagctgagaagcagaatcgcccagagatacaagaccaccggcaccaaagtgcgggtgtacaaaggcgctctgacagccgaagctagagctgcctctggcatcagcggcaatctgagattcatcgacggcgtgggcaagagcagactggatagaaggcatcatgccgtggatgccgccgtgatcagcttcatctccgactacgtggccgaaacactggcccagagaagcaacctgaagttcagccaagagctgcggagaaaggcccctcagtggaaagagtaccagggctctaacgccgctcacagagccgagtggaatagatggctgcagcggatgcaccacctgagccagctgctgtctcaagctctggaacaggatagagtggtcgtgatgagcaacctgcggctgagacttggaaatggcgccgctcatgaggacaccatcggcaagctgaccagcatcaaagtgggcgacgtgatcaccaccgaagagatcgatagagcctccagcgaagccctttggtgcgcactgaccagacatcccgacttcgaccagaaaaccggcctgcctgccaatcctgagcggtctatcagaatccacggaacccacctgaccgccgacgacacaatcacaagcttccctgtgaatgccggctgtatcgctctgagaggcggctatgtggaactgggcagctcttttcaccacggcagaatctacaaggtgccacagggcaagaaattcgccttctacatgatgcgcgtgtacaccatcgacctgctgccttaccggaaagaggacctgttcagcgtcaccctgaagcctcagacaatgagcgtgcggcagtgtcaccctaaactgagacaggccctggaaaacaacaccgccgagtatctcggctggctggtcacagatgacgagctgctgatcgacaccgccaagttcaatactggacaggtggcaggcgcccagcaagagttcggacaaatcaagagatggcggctggacggcttcgtgtccgattctaagctgagactgaggcccctgcacatgtccaaagagggactgaagcctgacgccagctccgacagcaagaagatcatcgataatcctggctggcggcctgccgtgaacaagctgtttacagatagccacgtgaccgtgatccgcagagatgctctgggtagacccagactccagagcacagcccatctgccaatcacctggcaagtgaagggatcc

SEQ ID NO: 179 - DNA, 4689 bp, Artificial Sequence
  OMNI nuclease sequence
ggtaccgacgaagtgaagcggtactacatgggcatcgacctgggcaccgatagctgtggatggtgcgtgaccgaccagaacttccggatcatcaagaagtccggcaagcacctgtggggcatcagactgttcgatgacgccaagaccgccaaagagcggagaagcttcagaacccagcggaagcggctgcagagaagaagatacagaatcgcctgcctgcgcgagatcatgggacctgctattgaggccgtggacaaggacttcttccagcggctggacaacagcaacctgttcgactggaaggacgagagcaagaagatccctctgaagaaggacagcctgttcaacgaccctcagttccacgacaaagagttcttccgggcctttcctaccgcctaccacctgagaagctacctgctgaccacaagcaagcgcgtggacatcagatggatctacctggctctggcccacatcatcaagtaccggggcaactttctgaaccccaacgaggacagcaacggcaacatggacctgcacgacatcaagaacagcttccagagcatcaacgctatcgcccagaccatctacgaccagtgcgacgaccccgatctgaaagagaagggcagcagcttcatcggcttcggctttaagagcaccggctccagcttcgaccctgacagcctgaatagcttcgagatcaccgatgaagaggccatcaaagtgaaagagatcttcaagaactgcaccggcgtgacagagacattcgagaagctggccaatctgttcgacgaggccgtgaagaacaagttcctgagcaccatcctgaagctgatctgcggcggcaaagtgaacagcaaggacctgttcctgaccgacgactacgtggacgaccagaatttcaagtccatcaagctggacgactgggacgagaaactggaacccaacctgagcagcatcaatgacatcttcgccagcctgctgcaagagtgcaaggccctgtatgacgcccacaacctgaccaacctgctgggcgattaccacttcatcagccaggctatggccggcagatgggacgagcagaaggatgagtttgaaggcggcagatacaacgagcacagaagccagctgcgggacctgaagcacatcgtgaaaacctactatcccgacaagtacagcgtgatcttccgcgacctgctggacaagggccagaaggacgacggcaaagagaactaccctagcctgatcggcagcagcatggtcaacagaagaaagatcaagagcaagcacgccaagatcgacgacttctacagcttcctgaagaaaaccatcaacctcgacgacctgtacaagcggctgaaggatagctctctgcccgccgagaaagacgacctgaagatcgtggaaaagatcaacgaggatatcaagaatcggaagttcctgctgcggcagaacagcggcgagaatggctatatcacccaccagctgcacagggccgagctgctgaagatcatcgacaagttcaaggccgactatccttgcctgggcgaaaaggacgacagaggcaactacaagatcctggatatcctgatgttcaagatcccctactacatcggccctctcgacaacaactccaagaacgtgaacagctgggccagacgggtgccagtgaatcaccctcagggcaagatcaagccctggaactgggatgagttcgtggataagcctaaggccgccgaggaatttgtggaacggatggttaacaagtgcagctacctcctgagcgagaaaaccctgcctgccaacagcctgatctacaccaagtacaaggtgctgaacgagatcaacaagatcgccgtgtccatcgacggcagcgtgtccagattctttagccaggacgagaaggattccctgttcaagctgtacgaggaaaagggcaagcccacactgagcgacattaagaactgggccaagctgtatttcagcagcgacaaggtggaactgtccaccagccagtccagcgacagagtgaacaagctggataagaactacctgcagagcaacctgaacagctaccgggacttcaagaatatcctgggcgacatcaaccacaccaacttcaacatcatcgagagcatcatccgggacatcaccatcttcgaggacaagagcatcctggacgagcggctgcggaacatcaatatcagcggccacaagctgaacgatgagcagatctccaagattaagaacctgaactacaaaggctggggagccctgagcgctgagctgttggatggcatcaaaggcatggatcacgcccctcagagcgaggaagagatcgaatctgccgacggacccacaatcctggaagccatggaaaaggtgtccgaggatgagaacggcaactaccacagcgacaacttcatggaagtgctgaacaatagcaagtaccacttctccgatatcatcaacttcatcaacgaagagaaaggcgccgagacatacaagggcttcgtgaagtacatcgaggatagcttcggcagccccatgatgaagagagctaccatccaggccatgaaggtcataagagaggccgagcacatcatcgggcaccccatcgacagattcttcatcgagtccacaaagagccccgacaagaaccagaagggcaagaacggaaacgacaagctgcggtccagagagctgagcaagagatacgagcagatcatgaagtccatctccgccagcgaccaggacaagattaacaaggacgccaatgagaagctgaaggggctgatcggaaagaacgataacagcaagttccgcatcaagcgggtgtacctgtacttcctgcagatgggcaaagacgtgtacaccggcgaggacctgagcttcgacgatgtcctgaagggcaccgacaaatacgacatcgatcacatcatccctcggagcatgatcaaggacgactccctggacaataccgtgctgacctccaaagccgtgaacaaccagatgaagggcgacagataccccattcctagaggcgtgatcaccagcaagggacgcgaggccattgagtttctgcacagaaacggcctgatcagctccgtgaagtataagagactgctgcggaccaaggatttcacagccgaggaactggccggcttcatcaatagacagctgaccagcacaagccagagcgtgaaagctctcggccaggtgctcaagatcgataccgacatccgcagagagaaggccaagaagtctggccagggcttcgaagagtacagaaaccccaactggaagcaagtgatcgtgtaccccagggccagcaacacccacgacttcagagtgctgttcgatttccccaagtgccgggaagtgaacgacttccatcacgcccacgacgcctacctgaacatcgtcgtgggagaagtgtaccggtctaagtacggcgacattgccaccgccaagaaaatcaaagagctgcgcgagcggaaaatcaatgaggacggctctgagacaggccccaccaacgtgttcggcaagatttgggatgagaatatcaagcggaccggcagcggcgacaccagcagatttgattggattcccgacaccaaggataagtccaagaaggatgccaccatccgcatcatcaaaaaagagatcagccggaaggacatcctcttcaccagaatgcccatcgagaagaacggcggcctgtgggacattaacatcatcagccccaaaggcaaggacaacctggtgtcccacatgagcatcaagaatagccccaaggactcccggctgtataagctgcacgacgtcgagaagtatggctactacaacaaccccagcgctctgtacttctccgtgatcagagccaaggtggacaagaacaaagacttcagctactacctggtgcctgtgcctagctacatcctgtccaagaatgccctggacgataacctcgtgtcctactacaaagtcaacggcttcgaccagccagagatcatcattaagaaggtgctgctgaacaccatctgctcctacgacgacgacaagagccagcctgtgtacagattcatgatcgcctccaagaccggcaagtctatcaaggtgtacaacgcctggcaggcttactaccccgataagttcatgtgctacggcaagctgattagcagcttcgtcgataagtacatcaaaaacaaggacctcgtcagcgacaaagaagaagagtataaggttttcaaggggaactccaaggattggtacgacatccccattccggacaagatctctaaagagaacaacctcgagctgtatgacttcctggccaagcagttcagcaagaacatctacaagcactggtccatcttctccaagctgggcgagagcctgcctcggatcagagatggctttatcagcagcagcctggtggatcagaccctgtttctggaatgcctgatcaactctctgcaccccggcgagttcaacttcaagtctgctcctgagggcctgctgaaactgaacaactgcaaaaagcagagcggcctgctccggatcaatcagtctctcggacccggcttcaaactgtacgcccagtctcctaccggcttctacgagaacgtgatctttgccatcgacaaaaacggcaacgaggtgtccaccaagaaaaacggcgtgggatcc

SEQ ID NO: 180 - DNA, 3624 bp, Artificial Sequence
  OMNI nuclease sequence
ggtaccaagtacaactacatcctgggcctcgacatcggcatcagctctgttggatggggactgctggccctggacgagaacaacaagccctacaagatcatcgacgtgggcagcagaatcttcacccctggcgaggtggaaaagaccggcgattctagagccaaagagcgcagagagaagcggggctccagaagagtgaccagaagaagagagttccggctggaccggatcagaaacctgctgtacgagagcaagctgctgagcggcaatgtgtccagcagcatcgtgtccgagaagaacaacgagctgaccatcctgtacaacaacatgatcaacaactactacaagagcaacaacacgaacccctaccggctgaaggtggaagccctggatagaaagctgacagccgaggaactggccatcatcctggtgcactacgccaagaagaggggctacaagtccaaccgggaagagagcaacgacaacgacagcggaaaggtgctgagcgccatcaaagaaaacgagacaatcatggccaccaacaattaccggaccgtgtccgaaatgtacatcaaggacgagaagttcaaggacaagatcaagaacagccccggcaattacaagatctccgtgaccaacgagatgtacctcgatgagatcaacaaggtgctggacaagcagatcaagttcggcctgatcgacagcgagttcaagaaccagtacctcgagatctacaacagccggcggagctatgctaaaggccctggcggaacatctccttacggcggcgacctgatcaagaaaatgaccggcaagtgcatcttcgacaaagagcccagggctcctaagtacgccttcagcagcgagctgttcgtggccatcagcaagctggtcaacctgcggtacaagatcggcaacgagagctaccagagcctggaaaacgccgccatcgtgaagctgatcgacctggccaaagaaaagaacatcgtgacctacaaggacctggtcaaggtcctgaacaaagagaacgtcaagattaaggacctgaacatgagcatgaaggacagcaaagtgatcgaggaactccggaagaagctggccatctccaacgagcaagagatcaatatctacgagctgagcgaggacgacaagaagatctacgatagcatctacaacgagaagctgttcagcaagaccctgatcgagctgaagggctaccacatgctgcggaaagtgatcaccctgtgctacagcaaggacatctggaacgaagtgaagaacaatatcgagttcctggacgaactggccctgtactgcaccaactacaaagtcaacgaggacatcaagaaagagattaagtcctccaaagtcatcgacagccgcttcgaagaggacgacttcatcaaggccctgcctaacttcaaggaccacctgatgctgagcaccaacatcatccgcaagctgatccccatcatggaaaacggcatcacctacgacaaggccatgaaggaaatcggctacaaccacagcgacctgtccggcaagttcgagaagaaagacctgctggtgcccgtgtacaccatccagaacatcaccaaccagcgcgtgatcagaagcctgacacaggccagaaagatcatcaacgccctcatcaagaagtacggcagccccaagatcattaacatcgagacagccagagagctggccaagagcagaaaagagcggaacgagattgagaagaaccagcaagagagaaaggccaagaacgagcagattaagaaacagctggtggacctggaactgttcagcgacatcaacaagatcagcagcaacgacctgctcaagtacaagctgtggcaagaacagaaagagttctgcggctacagcatgcggaagattaagatcgaggacctcttccggaacaacatcgtgcagatcgaccacatcctgccttacagccggacctacaacgacaattacctgaacaagaccctcgtgtacacaaacgagaaccaggacaagggcaacagaaccccatacgagtggttcggcaagacacggaagtgggagaactacgagagcttcatcaactccctgagcacagcccaggccaaaaaggacaactacctgctgaagaaactggacttcgacaccgagcgcgagatgagagagcagaacctgaacgacaccaagtacatcagcaaagagctggctaacctgattaaggcccacctgaaggtcgagaaagtgaacacataccctggcgccatcacaggcaagctgagagccagatggggcttcaacagactgacccacagctacatctcccagacctacatcatgcccgagtccatgaagtccgatatcaagaaggaccgcgagaaccatctgcaccacgccatggatgccctggttatcgccagcatcacacccagcctgcagcagaagatcacactgtacgaaaagttctcccggtacatcgacggcgtggtcaagagcgagctgcgcaaaatcaatatggaaaacatcgaggaaagcctgggcgagttctacgacagcgaaaccggcgaagtgaaagaggtcgagttcaaagagtacgttagcgagcagctgagccacggccacattagctttctgaagcacgacgtgtccaagctggaatttcccctgccttatgagaagttcgtcaaagaggccaagaccagggtctacgagcagaacatcgacatcctgaagcgggatctgcagctgctgggcacctacacaaccgaagaactggctaaggtgcacaccctgacacctagcgtggccaagtccaagatctctggcaagatgcacgaggaaacctactacgggatcaaagaaatcaaagaggaagaggccaccgtcaagtataagaccctgcggacccctatcgaaaaagtgaagcggaaggatctggaactgatccccgattgcagagccggaagcaaggatatctacaataccctggtggattggttcggaaccgccgagaatggaacagaggccctgaaacagcacgagggcaagtaccccatcaatcccaacgacaaagaacaaaaagagatcaagcgcatccgggtgtacagcgagtacaaaggcatcggccacgtgatcaaaaacagcaacgtggaaaaaggcggcatctacagagtggacatctacaccagcagaaacgagaatgacgaaaagctgtacttcgccgctcacgacatctacgagatcaagaagatcaaggcctacaaggataagaagcacgaggacaagaagtttaagatcaagctggactacggccagggcgagaagtacaagattattgagtacgacgagctgatgaaggaatacaacctgaagatgtccatctacaagaacgacctcatccggatcattctgaaggacggccgcgagtctatcgcctacatggttggatgtagcagcggcatgattgaagtgaagtccaagctcggcgacggctacgacatcatcggcaacaacaatatcttctccaagaagcgcgagcggtacaccgtgacactgagcacaatcagcaagatcgagaaaatcagcatcaacctgctgggcgagatcagcggcctgggatcc

SEQ ID NO: 181 - DNA, 3186 bp, Artificial Sequence
  OMNI nuclease sequence
ggtaccaacaagatcctgggcctcgatctgggaatcgccagcctgggctactgcgtgatcaacatcgacgacgagaacttcgccgctggcgatattctggccaccggcgtgcgaatcttcgacgtggccgagaatcccaaggacggcaattctctggccgctcctagaagaaaggccagaagcctgcggagaatcctgcggcggaaagtgatgagaatccaggccatcaagcagctgtttctggacttccatctgctgacccctcaagagctgaacttcctgagccagcaggacttcaagcggctgtacagagccgatcagctggtcaacggctacatcccctctgtgtgggagattagagccagaggcctggacgagagactgcccatgcaggatatctgcagagccctgctgcacattgccaagcggagaggcttccggtccatgagaaagagcgataagccttctggcgaggccggcaagctgctgaaaggcgtggaagagatgagcaagacactgcaggccagccacttcagaaccatcggcgagatgctgtaccatctgcctaccaccgagcctaagcggaacaaggatggcagctacaaccactctatcgctcgggccctgctggaaaaagaagtgcatctgctgctgcagacccagagagataagggcgctgccctgctgagcaaagagttcgagaacaagttctgcgagctgagcttctctcagcaccctctgcagccatctgatgccggctactgtaccctggaacctaacaagaagagagcccctaagcacgcctacaccgccgaactttttgccgctctgtgcaagatcaaccacatctacctggaagagaacagccacagctaccctctgagcgcctctcagagagccctggctctggaaaagtgcctgagcacccagaaaacaaactacaagcagctccgcgagctgttcaacctgcctgaccacatcaagttcaacatcagctacacagcccctgccaagaagaagtccaagcagaccgagacaaagagccccgagcagatcgcccaagaggccaaagaatacgacgccgagaagaacaccacactgtacaacatgaccggctttcacgccctgaagaaagccctgaacagcatgcctctgtggaccgagtacaagaacaaccccaacggcatcctggacaagatcgccgagatcctgagcagatacaagagcgacggcgagatcaatcagcacctgacagccctgggactcgaagccgaagctgtggaaaagctgcagaacgtgaacttcagcggcttcatgaatctgagcctggccgccatgaacaagatcatcccatttctgaaagagggcctgctgtatcacgacgcctgtcagaaggccggctacaactttcaggccacacctcagaacaagggcctgagcaaactgcctcctctgaccgaggaagatggccacacaattacaagccccgtggccaagagatcactggcccaggccagaaaagtgatcaacgctctgaacaagaagtacggccccttcgacgccgtgcacattgaggtggcaagagagatcggcaagtccttcgagaagcggaaagagattgaggccaaccagaaggccaacgccgaggaacggaccagactgaaagaagtgggcatcgacggcatcatccccaagaccgaaaccgacctgaaaaagctgagactgtggaaagagcaagagggcttcagcatgtactcccacacctacatcgaccccaagaagattctggaagagggattctgcgaggtggaccacattatcccttacagcaagagcttcgacaacagcctgaacaaccaggtgctgtgcctggccagcgagaatcaagagaagaagaactgcatcccctacgagtacttccagaacagaaagacccagatcacctgggaagagtttgagggctacgtgaactgcctgaagaacatgcggatggccaagaagcaccggctgctgaagcaagaactgaccaaagaggacctgcagggcttcaaagagcggaacctgaacgacaccaagctgatctcccggttcatgaagaactacctgagcgccaacctgaagctgaccggcaagtataagcagggcgtgttctgcatcaacggccagcacacaaacaccctgagaggcttttggcggctgaccaagatcagagaggaaggcgataagcaccacgctctggatgccatcgtgatcgcctgttgcaccaaccagctcatgaactacatcagcaccaagtactgccagggcagagagatggaactgaagagaaaagaggtggccgttccttggccgtggcctcactttaagagaaccgtggaaaacgctctgctgggcatcttcgtgtcccggcctccaagaaagaaagtgacaggcccactgcacaaggacaccttctacagcgccaaacatatcgccaagggcatcaagaccctgcggaccgacatccagaagctgacaatcgaggccattaagaagcagcgcgagctggaagtgaagtactttggcgtggaacggaacaagcccctgtacgacctgatcgagaaggccctgagagcccggcctaacgataagacacctatcgaggtgcagctgcccaccaaaaatggtggcggagtgcctgtgcggcacatcaagctgattaccgagagcacaacaggcgtgccagtgctcggaggaacagccagagcagaaaacggccccatgcctagagtggacgtgttcctggaaaacggcaagtactacctggtgcctatctacaccatggacttcgccaagagacagctgccactggtggctcaaccatccggcagactgatgaagaaagagaatttcgtctttagcctgtacaaggacgactacgtcaacgtggtcaacgagcagggcgagacatgggagggctactttaagcagctgaatgcccagaccggccagatctatctggaaagccacgacagaagcgccaagtacacagtcagcggcaagcccagcaatcagaagaagatcgcctccagcacactgaagctcatcgagaagtaccagatcgacatcttcggcggcaagcacctcgtgaaaaaagagaagtacatcgggatcatccggaagaacaaaggcttcggcggaggatcc

SEQ ID NO: 182 - DNA, 3552 bp, Artificial Sequence
  OMNI nuclease sequence
ggtaccaagtactgcctgggactcgatctcggcgtgggatctattggatctgccgtggtggaactggacgcccagaacaatcctgagtctattgccgatgccggcgtgcgcatttttgaagtgtctgagggcgccatcgaccggcggacaaagagaacagccagaaagaacctgatccggaccaagaagagactggaactgctggcccagaagctgttcgagaacaacctgtgggtgtccgccaatccagagggcaccgacaacctgaagtctaagagcccctacaagatcagatacgacgccctgaacggcaagctggaaaaccagaactacatcggcagagccatcctgcacctggccaaacatagaggcgctggctttgtgtctgccagcgaggaatctgaggaagaggtgctggaagagggcgagaagtctagaaagaagcccaccgcctacgagctgatggtcaaccacctgaaagagacaaacagccggaccatcggcgagttcttctacaagagaatcctcgagagctacgagaagaacaaagagacaggcgagcacgacaagatcaagctgagaaccgtgcggcagaaatctggcgccgtggactacgccattcctagatacctggtcaaggacgagttcaagcagatctgggacaagcaggccgagtacttccctcagatgcagaaggacggcctgaagcaagagatctacgacatcctgttctacgagcggcctgccgctccttatgccaccggcaagtgcatctacttccgcgacgaggacagactgctgaaggcccatcctctgagcgagatgcggagaatctacgaggaagtgaacaacgtttccgtgctgagcgataccggcaagagacacctgaccatcgaggaacgggacaagatcgtgaacgagctgctgctgcagggcaagaatgccggctgtcagagcatcaagaaggtgctgaatctgagcggccagcagaagctgagcatcgacgagaaagaggaaaagcagaagcccatcaaggcctacctgtacagcagacctgagttcgcccaggtggactacatcaagaatctgtcccaggatgagctgatcaagttcaccgagtttctgggcaaccctctgaaccccgaggatagacacggcagactgtacaacgaggacgaagtgatcaacaagctgaagcctatcctgggcatcgatgacgagaagcagatcgccaagctgctgaccatgctgcccaagggaagagtgatgctgggcatcagcgccacacagaagatcctggataagctgaaaaccgagacagacgagaacggctacgtgctgggccacagaaagatcaccgacaagctggccaaagaggacaagcggtttatggccgccgaggaaatcgccagacagaaccagggcaagtgcttcgagctgccctactatggcgagatcctgcagaccgacacacagagctttccacctctgctgctgaagaacaaccacagcctgaacgaggatgagaagcagtggggcaaagtggccaatcctgccgtgcacatgatcctgaaccagattaagctggtcgtcaacgagatcgtcaagatctacggcagaccctacgagatccacatcgagctgggaagagatgtgggcctgagcacaaagaagaagaacagcctcgagaagatgcaaaaggccaacgagaagctgaacgaagaggccaagaagtacctgctggaacacaagatctatgtgaacagcaagaacatcctgaagtggaagctggctcaagagcaaggctgggtcgacgcctacaatcccactcagaaaacaacccagaagatcgacagacggttcatcggctttgagatcgagcacatcatcccacagagcagaggcggcaccgatacctacaacaatctgtgcctggtgtccagagccgacaacgaggccaagggcaacgagttcgcctacgactacttcgtgaagtccaagacacccgagatgatccgggccatcctgaacaatgcccggaccaaactgaaaaacaaggcttggagattcgaggccgacgccagagagaaattcgaggacgagggcgacaaagaagagacaaatcggtacatgaccgacaccagatacgtgtccaagctggctgccagatacctgagagccatcgtggattgcagcgccgatgatggcgtgatcgagaacagaatcctggccgtgaaaggcggacagaccgccgagctgagaaagcggtggaatctgcagggcctcgagtacgacctgatgggcctgaatatccctcggtacatcgactgcgccccttactggcagaatctggaaaccggcgagatcatcgacggcgagcagaaacccgacatcgatggcaactggaagttctacgactgcaagaaaaaccccgagtggtccgccaagcctcggatcgatcatagacaccacgccatggatgccatcaccgtggcctgctgcaattggaacatgatccggcagatggccaacgaaaccgacctgcacaaagtgaccgtgcctctgcctatggcctctgtgcagtctgtgggcgagttcagacggaaagtgatcgacgtgctgaaagaagtgaaggtttcccacaagcctgaccacaacaaactgggacagttccacgaagaaaccggcaaagtgaagctgggaatcaaccccgacaatcccgataacctgatcaccgtgtacagccggaagattctgcaggtcgtgaaaacctacaaggacctggacaagatgctgatccccgacagcgtgaaggacagctggcacgaagagatcgccgagaatagagtgcggcaggctaagctggtggccgacttcaagcagtactggaacctggccgaacagatcctgctggctgagaacgagaaggacatggccgagggcaaaaaagagcgcgagatcacagagggcctgatcattgccaagaccttccacattctgctggacaaaaagttcatgggcgagaaagtgtggaagggcgataagttcaagtgttacgagaacgtgtccagctacgtgtacgtgcggaagcacaacctggtgtacaagagcggcaacaaccactgcgtggacttctatgagaaggatggcaaagtcggctgggaagtcgtgaagagattcgacgtgaaccaggacggcttcgtgccccagtggaagaaagacggcggaaagctgatttggagcgtgcagcagagagacatgctcgagctggatacccctgacgagtggaagtcctacaccgacaaagagcggtgcctggctaaagtgaagaagttcagcgacgggaagctcaccatcgactacatggctgacgcccggatgacagcccctaaggacaagaccctgaagtacatgttcgtggacagcgtgtccgagaagggactgagcttcttcatcaagcacaaggcccggaagatcgagctgacccctttcgggaaagtcaagaagaaacacaaggtcctgtggaacggcaaaaagacagccgccggatcc

SEQ ID NO: 183 - DNA, 3288 bp, Artificial Sequence
  OMNI nuclease sequence
ggtaccaagtacaagatcggcctggatctgggcagcacatctctcggatgggccgtcgtggaactgaacgaggccgatcagatcaccagcctggtggacatgggcgtcagaatcttccctgacggcagagatgccaagagccacaagcctatcaacgtgatccggcgcgagcacagacaaatgcggagaagaggcgaccgggtgctgctgagaaagaaaagagtgctgcagctgatccacaaatacggcctggacttcgacatcagcgccgacatcaagctggaagatccctacgtgctgagagccagagccgtgtctgataagctgtctagcgccgaactgggcagagtgctgtttcatctggccctgagaaggggcttcaagagcaaccggaaagagactagaggcgacagcggcggcaagctgaaaaaagccacactggccctgcacgacgccatcggagataagacactgggcgagttccaggtggacagcaagagatacagattcgccgaccagttcgacggcaacaagatcaaggatggcgctctgtaccccaccagagacatgtacctggacgagttcaaccggatctgcagcgtgcagaacatgagcgacgacatgcggcagcagttcgagtacgccatctttcatcagaggcccctggtgcctcctgagatcggcacctgtatgttcgagctggaccagcctagagcctacaagttcgagcccgtgttccagagattccgggtcctgcagcagatcaaccagctgcggatcatcaacaacggcgagatcaaagagctgaccgccgagcagagagagaaactgcaagacgccctgctggccaccttctgcggagtgaagagagataagagcggcagacccaagatcaccttcgccgaagtgaagaagctgctgggcctgagccggaacaccaagttcaacctggaaagcgagaagcggaaggacatggatgtggatgccaccgcctttgcctttgccgagtgcgaactggccgatttttggagagcctgcaccgacaacgtgaagtctcaggtgctggcccacctgaacgacgatgagctgagcgatagcgacctggtggattatctggcccacgagtacggcatcagccaggataaggccgagaagctgattcagcagccctttgaggatggcgtggccaatctgtctgtgtgcgccatgcagaagatgctgccattcctggaacagggccacctgtaccacattgccgccaaagaagccggctacgatcacgccgatagaggcatcgtgcacctggacacactgccttactatggcgacgtgatggctctgaggcctagcctggttcaggacaagatgggcagataccggaccatgaacgccaccgtgcacattgctctgaaccagctgagagctgtggtcaacgacctgatcgccagattcgatggcgagccctacgccatcaacatcgagatgggaagagatgtgtccgctggcgccgatgagagagccgagattgaaaaacagcaggccgccaacaagcgcgagaacgatagaattgccacagagctggtcgccatgggcgttagagtgtgcagagagaacatccagaagtacaagctctgggagaacctgggcaagagccctctggatagaagatgcgtgtacaccggggagatcatcagcaaagagaagctgtttagccccgagttcgagatcgagcacatcctgcctttcagcagaaccctggacgacagcatggccaacaagaccattagcgccgctgtggccaaccggttcaagggcaatagaagccctgacgaggccttcagcgatcccaagtctccctggaagtacgaggatgtggtggctagagcccagaacctgcctgatgccaccaagtggcggttcaacagaggcgctatggacgtgttcctgcaaggcaaagagtgtatcgccagagccatgaacgatacccggttcatgacccggatggccgtgacatatctgcagcacgtgtgcgccgacaagaacagagtgaatggcatgcctggcagactgaccgcctctctgagagatgagtggcacctgaactggtggaagaacaaggccgaggaaagcaagtaccggggcaatcacatccaccacgccattgatgccttcgtgatcgcctgtaccgacgagaatatcctgagaaagctggccgacgccaagagcgacatgcacacaccttttccaggcttcgactacttcgacttcaagatgagatgcgagaacaccatcatcagctaccggcagagccagaagaaccctaaggacgcccacagcacagtgggctgtctgcacgaggataccgcctacaatctggaatgtttcgaggacggcggatgcggcgtgaacgccgttatgtctcacagagaggaactgcccaccaccgacaaggacaagaaggcctttgccaaggatttcaagaacgtgaaccccaagactctgcagatgttcctgaatgatgccggcgtggcaaacgaggaacccgatatcgccatcaagtttctggattggtgcgctatgcggaacatccggaaagtgcggatgtacaagacaggcgtggacgtgaccacctacgtgcccgtgtttcggaccaagaaacagcgggatgtgtacagagccgcctacctgaattggtacgtgaacactggcgtggcatccggcatcgtggacaagaaactgagagccgtgcagcaagaaaaagagaaacacctcctgcaagagtttcaggacgccgccaagcaggcctataagtggtacgtcggcggcaacaacttctgcgccgagatcttcgagatccgggacgacgacacaagataccccaagctgagaggcagatggcaggtcgagatcctgagcaactacaacgcccagctgaatgctggcgccccactgtggcgacacaaatatgccacagccaagcggatcatgagcctgagaatcaacgacatggtcatggccgagttcagcaaggacgaccctaagctgcctaaaggcctggttgaaacagtggcccaccagtgcgccatcgagaaaacagacaaagtgaacgtggtgtttcgggtcaagaagctgaacagctccggcaccgtgtacctgaggccacactttatcgccaaagaggacgccgacaccaagtcttggatcgcctctgccacatctctgcaagagcacaaggccagaaaagtgtgcgtgtcccctagcggcaagatcctgggactgaaaggatcc

SEQ ID NO: 184 - DNA, 3288 bp, Artificial Sequence
  OMNI nuclease sequence
ggtaccaagtacaagatcggcctggacctgggcagcacatctcttggatgggccgtcgtggaactgaacgaggccgatcagatcaccagcctggtggacatgggcgtcagaatcttccctgacggcagagatgccaagagccacaagcctatcaacgtgatccggcgcgagcacagacaaatgcggagaagaggcgaccgggtgctgctgagaaagaaaagagtgctgcagctgatccacaaatacggcctggatttcgacatcagcgccgacatcaagctggaagatccctacgtgctgagagccagagccgtgtctgataagctgtctagcgccgaactgggcagagtgctgtttcatctggccctgagaaggggcttcaagagcaaccggaaagagactagaggcgacagcggcggcaagctgaaaaaagccacactggccctgcacgacgccatcggagataagacactgggcgagttccaggtggacagcaagagatacagattcgccgaccagttcgacggcaacaagatcaaggatggcgctctgtaccccaccagagacatgtacctggacgagttcaaccggatctgcagcgtgcagaacatgagcgacgacatgcggcagcagttcgagtacgccatctttcatcagaggcccctggtgcctcctgagatcggcacctgtatgttcgagctggaccagcctagagcctacaagttcgagcccgtgttccagagattccgggtcctgcagcagatcaaccagctgcggatcatcaacaacggcgagatcaaagagctgaccgccgagcagagagagaaactgcaagacgccctgctggccaccttctgcggagtgaagagagataagagcggcagacccaagatcaccttcgccgaagtgaagaagctgctgggcctgagccggaacaccaagttcaacctggaaagcgagaagcggaaggacatggatgtggatgccaccgcctttgcctttgccgagtgcgaactggccgatttttggagagcctgcaccgacaacgtgaagtctcaggtgctggcccacctgaacgacgatgagctgagcgatagcgacctggtggattatctggcccacgagtacggcatcagccaggataaggccgagaagctgattcagcagccctttgaggatggcgtggccaatctgtctgtgtgcgccatgcagaagatgctgccattcctggaacagggccacctgtaccacattgccgccaaagaagccggctacgatcacgccgatagaggcatcgtgcacctggacacactgccttactatggcgacgtgatggctctgaggcctagcctggttcaggacaagatgggcagataccggaccatgaacgccaccgtgcacattgctctgaaccagctgagagctgtggtcaacgacctgatcgccagattcgatggcgagccctacgccatcaacatcgagatgggtagagatgtgtccgctggcgccgatgagagagccgagattgaaaaacagcaggccgccaacaagcgcgagaacgatagaatcgccaccgagctgattgccatgggcgttagagtgtgcagagagaacatccagaagtataagctctgggagaacctgggcaagagccctctggatagaagatgcgtgtacaccggggagatcatcagcaaagagaagctgtttagccccgagttcgagatcgagcacatcctgcctttcagcagaaccctggacgacagcatggccaacaagaccattagcgccgctgtggccaaccggttcaagggcaatagaagccctgacgaggccttcagcgatcccaagtctccctggaagtacgaggatgtggtggctagagcccagaatctgcctgaggccaccaagtggcggttcaacagaggcgctatggatgccttcctgcagggcaaagagtgtatcgccagagccatgaacgatacccggttcatgacccggatggccgtgacatatctgcagcacgtgtgcgccgacaagaacagagtgactggaatgcctggcagactgaccgcctctctgagagatgagtggcacctgaactggtggaagaacaaggccgaggaaagcaagtaccggggcaatcacatccaccacgccattgatgccttcgtgatcgcctgtaccgacgagaatatcctgagaaagctggccgacgccaagagcgacatgcacacaccttttccaggcttcgactacttcgacttcaagatgagatgcgagaacaccatcatcagctaccggcagagccagaagaaccccaaggatatccacagcaccgtgggctgtctgcacgaggataccgcctacaatctggaatgtttcgaggacggcggatgcggcgtgaacgccgttatgtctcacagagaggaactgcccaccaccgacaaggacaagaaggcctttgccaaggatttcaagaacgtcaaccccaagactctgcagatgttcctgaatgatgccggcgtggcaaacgaggaacccgatatcgccatcaagtttctggattggtgcgctatgcggaacatccggaaagtgcggatgtacaagacaggcgtggacgtgaccacctacgtgcccgtgtttcggaccaagaaacagcgggatgtgtacagagccgcctacctgaattggtacgtgaacactggcgtggcatccggcatcgtggacaagaaactgagagccgtgcagcaagaaaaagagaaacacctcctgcaagagtttcaggacgccgccaagcaggcctataagtggtacgtcggcggcaacaacttctgcgccgagatcttcgagatccgggacgacgacacaagataccccaagctgagaggcagatggcaggtcgagatcctgagcaactacaacgcccagctgaatgctggcgccccactgtggcgacacaaatatgccacagccaagcggatcatgagcctgagaatcaacgacatggtcatggccgagttcagcaaggacgaccctaagctgcctaaaggcctggttgaaacagtggcccaccagtgcgccatcgagaaaacagacaaagtgaacgtggtgtttcgggtcaagaagctgaacagctccggcaccgtgtacctgcggcctcactttattgccaaagaggacgccgacaccaagtcctggattgcctctgccacatctctgcaagagcacaaggccagaaaagtgtgcgtgtcccctagcggcaagatcctgggactgaagggatcc

SEQ ID NO: 185 - DNA, 3336 bp, Artificial Sequence
  OMNI nuclease sequence
ggtaccaagtacaagctgggcctcgatctgggctctacatctctcggatgggccgtcgtggaactgaacgacatggacaacatcacccggctggtggacatgggcgtcagaatcttccctgatggcagagatgcccagagccacacacctatcaacgtcgtgcggcgggaacacagacaaatgcggagaagaggcgacagagtggccctgagaaagaagagaaccctgcagctgatccacaaatacggcatggacttcgacatccacagcaacgtgtccctggaaaacccctacgctctgagagccagagccgtggtggaaaagctgcagcctcaagagctgggcagagtgctgtttcacctggctctgagaaggggcttcaagagcaaccggaaagagacaagaggcgaggctggcggcaagctgaaaaatgccacagtgtccctgcaagtggccatgggcgataagacactgggccagttccagttcgagagccacagatacagattcgccgaccagttcgacggcaacaagatcaaggacggcgccttctatcccaccagagacatgtacctggacgagttcaaccggatctgcgccgtgcaagagctgcccgataatgtgcggaaagagttcgagcacgccatcttccatcagaggccactgctgcctccagtgatcggcacctgtatgtttgagctgggccagctgagagcctacaagttcgagcccgtgttccagagattccgggtcctgcagcagatcaaccagctgaggatcatcgacaacggcgtggtcacagagctgtctggcgagcagagacagaaactgcaggacatcctgctgagaaccttcgacggcgtgaagagggataagagcggcagagtgaagatcacctttgccgccgtgcggaagatgctgggacttgccagaggcgtgcggttcaacctggaaaccgagaagcggaaagaaatggacgtggacaccaccgccttcgccttttctgagtgcggcctgagcgacttttggtacgcctgtcctgacgacaagaagtcccagatcctggccagaatcaacgacgacaccctgaacgacgacgacctgatcgattacctggtggataagtgtggcctgaacagcgacgtggccgctcagctgattcagaggccttttgaggaagggatcgccaacctgagcgtgtgcgccatgcagaaaatgctgccatttctggcccaaggcgacctgtaccatgtggccgctgataaggccggctacaatcatgctgatagaggcgtggtgcagatggctcagctgccttactatggggatgtcgccgctctgaagcctagcctggttcctgacaagaacggcgtgtacagaaccatgaacgccaccgtgcacattgccctgaaccagctgcgggccgttgtgaatgatctgatcgcccagtttggcagcgtgccctacgccatcaatatcgagatgggacgcgacgtccgagccggcgctagagaaagagccgaaattgatagccagcaggccgccaacaagagagagaacgatagaatcgccagcgagctggtcgtgatgggcgttagagtgaacagagagaacatccagaagtataagctctgggagaacctgggcaagaaccctctggatcggagatgtgtgtacaccggcgagatcatcagcaaagagaagctgttcagccccgagttcgagatcgagcacatcctgcctttcagcagaaccctggacgacagcatggccaacaaaacaatttccgccgtggccgccaatcggttcaagggcaacagatcccctgacgaggccttcaccgatagcaagagcccctggcactacgacgatgtggtggccagagcacaaaatctgcctggcgccaccaagtggcggttcaatagaggcgccatgtccgcctttctgcacgaccaggattgcattgcccgggctctgaacgatacccggttcatgactagaatggccgtgacctacctgcagcatgtgtgcgccgataagtacagagtgaccggcatgcctggcagaatgaccgccatgctgagagatgcttggcacctggactggtggaaggacaaggccgacgaggaaaagtaccggggcaatcacatccaccacgccatcgatgccttcgtggtggcttgtacaggcgtgggaacactgcagcacctgagcagaaatgccatcgagacagacaagctgttcggcaagacccagaaagaaaagcggcggcagtggttcgtggacatgaatgtgcccttcgatggcttcgactactacgacttcaagatgcgctgcgagaacaccatcatcagctaccggcagagccagaagtcccctaaggatagcaagggcaccatcggctgtctgcacgaggataccgcctacaatctggaatttttcgagcggggcaccacagccgtgatgagcagaagagatgctctgcctaccaccgacaaggacaagaaggacttcgccaaggccttcaacaacgtgaaccccaagactctgcagatgttcctgaaggacaccggcaccaccaacgacgagcccaatattgccaacaagttcctggattggtgcaccctgcgggacatccggaaagtgcggatgtataagcgcggcgtggacgtgacaacctacgtgccagtgttccggaccaagagacagagagatacctacagagccgcctacctgaattggtacgtggccagtggaattgccggcggaatcgccgacaagaaaatgcggctggctcagcaagaaaaagagaaggccctgctgcaagagttccagaacgccgccaagctggcctataagtggtacgtcggcggcaacaacttctgcgccgacgtgttcaagatgagggacgacgataagagataccccaagctgagaggccggtggcaggtcgagatcctgagcaattacaacgcccagctggatgccggctctccactgtggcgtaggaagtatgccacagccgagagagtgatgcggctgcggatcaacgatatggtcatggccaccttcagcaaggacgaccctaagctgcctaaaggcctggtcaagaccgtgatgcaccagtgcaccatcgagaataccgacaccgtgaatgtgatcttccgcgtgaagaagatcagctccaacggcaccatctacctgcggcctcactttatcgccaaagaggaaggcgataccaagtcctgggctgcctctgctgcttctctgcaagagcacaatgcccacaaggtgtacgtgtccccatctggcaaactgcagtgcagcgaaggatcc

SEQ ID NO: 186 - DNA, 3195 bp, Artificial Sequence
  OMNI nuclease sequence
ggtaccgattacatcctgggcctcgatctgggctctacatctctcggttggagcgtggtggaactggacaagaatggcgtgccagtgcggctggaaaggatgggcgtcagaatcttcagcgacggccgggacagcaagaccaaagaacctctggccgtggctagaagaaccgccagaggcatgcggaagcggagagacagatacgtgatgcggcgggaaaccctgatgaacaagctgattaagtacgggctgatgcccgagaacgccagcgagagaaaagccctggaaagactgaacccctacgagctgagagtgaaaggcctggacgagaagctgtctcctcacgagctgggcagagtgctgttccacatcaaccagcggagaggcttcaagagcaacagaaagaccgaccggaagaacgacgaggctggcgccatgaagtctgccatcagagatctgaccgagaagatgaccgagagcggcgccagaacactgggcgagtacctgtacaacctgaacaaggacagaaagagcacccagaacttcgcccctgtcagagtgcggacccacctggaaaagtctaaggccgtgtacagcatgtaccccaccagagagatgtacgaggacgaagtgcggcagatcttcctgaagcagaccctgtccgacgagatcaaggccgacctgttcaagaccgtgttcgaccagaggccactgaaaacccctccaaagggactgtgccccttcgagaagtccgaggaacggtgctatatcgcctttcctgacttccagcggttcagagccctgcagcagatcaatcaactgagagtgcgggacgacttcaccgaggtcgagctggacgataagcagaagagagagctgagacactggctgctggatgacttcagcaagctggacaaggactacagactgaccttcgccgccatcaagaagatcctgaagctgcccaagaacgtgaagttcaacctggaaagcgagcggcgcaaaggactggacgccgataagacatctgctcagctgcagcctctgtttggcacagtgtgggccgagaagcaggacgagattgtggacctgctgctgaacatggaaaacgaggatgagctgaaacaggccctgcagaagtacggcctgaccgacgaacagatcgaacaggtgctgaccgtgaacctgcctgatggcacaggatctctgtctctgaaggccatcggcaagatcaacccattcctggaacagggcatgctgtatgacaaagccgtggtggccgctggctacgtgttcagcaagaagttcgacaagctgcccgataagtacgagacattcatcgaccccgagtacggcaccgtgtttgacgagctgccttactatggacaggctctgcctgagagagtgatcggcggaacccacaaggatgaggataagggcgacgaggccaagttctttggaaagatcaacaaccccaccgtgcacattgccctgaatcaagtgcggaagctggtcaacgtgctggtcaagaagtatggacaccccaacagcatcgtggttgagctggccagggatctgaagctgagccgcgacgagaagaagagactggaaaaagagcagacacagaacgaggccgagaacaagagaatcggcgacgaactcgtccggctgggcgtgaagaacaactacgacaaccggatgaagtacaagctgtgggaagatagcagcaaggaccccatccagaggtgctgccctttctgcggaaaacctattcctgccgccgaactggccatgagcgccgagtttgagattgagcatctgctgcctttcagcagaagctacctggacgccaggtccaacaaggtgctgagctgcagacggtgcaacagagagaaggacaacagaagcccctgggaagccttccacaacgacgccaagagatggaacgaaatcctggccagagccgagaaactgccagagaacaagcggtggaagttcaatgaggacgccttcaagaagctgcaggacgaaaacggcgacgtgctggccagaatgctgaccgacacacagtacatgagccggatcgccagacagtacctgtgctttgccgccaatcctaagagagtgtacggcatcccaggacagctgacctccaaactgagagagcactggggcctgaacagcatcctgagcgagcagcacgagaaggaccggacagatcacagacaccacgccatcgatgcctttgtggtggcctgtacaagccggggcacactgcagaaatatgccaccgagagaagagatttcggcgagatgcctcaagagaaggcccctcacatcccatttccagccttccggctggccgagatcaaagacgccttcgacaagatcgtgatcagccacaagcctgaccacggcaaccctcagaaggccattagacagggcaagacagtggccaagctgcacgaagaaacctactacggcatgattggcgacggcgagaagaaaggcaccgtgcggctgacaaagagagtgccttgtctggccttcaccaagagcttcaatccccagaagaagccctacaaggtcgaggacatcgtggatcagagcggcaccgccaacaagatcagagagcgcctggaaaacagcgaccccgccgattacgagaagatcgtcatggaatacttcaacgagcggggcatgaagcacgtgaaggtgttcgaggatcggaacaagaatgtggtgctggcctttaacgaccgcaagacaaagcagccctacagatacgccatctacggcggcaatgcctacgccgagatctactgccccgatagaggcaagaatgccggcaagtggcagatcgagatcatccccaactacagagcccaccagaaaaacttcgtgcccaactggcggcacatggatgcccacgccaaactgatcatgcggctgcacatcgacgacatggtggcctacgaagagaacggcaaaaccgtgattgcccgcgtgaaaaagatgacctctggcaagatctacttccgggaaaacaagatcgccaaagaggacggcgatagcaagagctgggccgcctatccttctggcatgcaagagaagaacatgcgcaagatcaccgtgaccgtggacggcgtggtcctggactctaaaagacctaaaggcggagccgacggcggatcc

SEQ ID NO: 187 - DNA, 3060 bp, Artificial Sequence
  OMNI nuclease sequence
ggtacccggatcttcggctttgatctgggcgtcgcctctatcggatgggccgtcgtggacatcgacaaagagaacgataaccctgaagccggcagagccgccatcggaaaaattcagcagagcggcgtgcgcatcttcagcaaggccgagagcacagatggatctagcctggccgctcctagacgcgagaaaagacttgttcggagagccctgcggcggaaggccctgagaatgaaggaaattcgggccctgctggaaaacagcggcctgggctctcagaatatcgtggtcaacgccgacgatatcgacgtgtgggctctgcgcgctcaggacgccttctgtagaaagctgtctgcccgggaactgagccgggtgctgattcacatggccaagcacagaggctacaagagcatgagaaagagcgccgaggaaaacgacaaagaaaccggcaaggtgctggtgtctatcgcccggaatagagaatccatgggcgagtacaagacaatggcccagatgatctacaagtccaactgcgacggcgccagaaagtacagaaatggcgacggcgtgtacgacaacagcatccccagagaggaaatcgagagagagctgaactacatcttcgatgcccagcagaaatacggcgtgttcaccgaggatctgctggaacagtacaagaaaatcgccttcagagtgcgccccatccagagcgtgggaaagatggttggactgtgcaccctggaacctaactgcctgagggcccctaaagagtctcctaccgccgaactgtttgtggccctgaccaagatcaacaacatgaagatcgtgatcgacggcgaagtgcggagcgtggacgatgccgaaagagccgctattctggaactgctgagcaagacccagaccgtgaagtataagaccctgcacaacaagatctggaagggcaaagacgtggtgttccggggcgtgaaagaggaaagccaggacttctacagcatgaccggctggcacaagctgaagaaaatcatggacgaggccgacatggccgacaccagaatgctggacagaatcatgaaggtggtggccacacagaaggacgacagcgccatcgagaaagaactgcggagaaagaaggtgcccgagaagtacatcgtggaactgaagaagctgtgcaccagcaagttcatcaacctgagtctgcaggccctgtacaagatcgtgcctgagatgatgagaggcctgacctacgataaggcctgtgatggcgccggatacgacttcaagtctaaggtgtcaggcgaagtgaaggccgacaacggctgtatcgccgagatctctgaatggacccacgtgccagtggtcaacagaacagtggcccagttccggaaggtgtacaatgccctcgtgcggaagtacggcatccccgaccaagtgaatctggaagtgggccgcgagctgaaaaacaacttcgacgaccggaagaagatcgagcggaagcagaacgagaaccgggacaagacagagaaggccagagccgagtatgaggccctgatcagccggaaagtgaccaccaaagaggtgctgaagtacaagctgtaccaggaccaaggcggcaagtgcatgtacagcggcgagagcattgacctggaacacctggacaactacgaggtggaccacatcctgccttacagcagaagcctggacaatagctacatgaacaagatcctggtcaagtacaccgagaaccagatcaagggcaacaagaccccttacgagtacttcggcaacaccctgagatgggacgactttgtcgtccgggtgtccgccacaaaaaccctgggagccagaaagatctacaacctgctgaacaaggacttcgagacaaccgaggacgacttcagaaagcggaacgccaacgacaatgcctacgccgccagatacgtgcggcaggtcctgaatactgcctttcctgacctgagagtggacgtccgagctggcgctctgacacactatctgagaggacagtggggcctcgagaagtccagaacagagtccgatagacatcacgcccaggacgccatcgtgattgcctgtgctacacctggcatggtccgatacctgagcaccatctccggcctgttcgagaacaagcgcaacgagaagggcaagccctggtggaacaacctcaagcagaacatccaagagccttgggccggcttccgggccgatgtgtttagatccgtggatgacgtgttcgtgtcccggacagttagaggcaaggccacaggcagcgtgcacaaggacaccatcaatagccctaagagcagcaagggcagcctgatccttcctagaggccgggctgacaaagaaaacatgttccggatggacgtgttcaagaaggacggcaaatacgtcgtggtgcccatcttcgtggccgataccgtggataagaagcggcaggacatcttctaccctcaacctgccaaggccgaacacagcgtggccattgatggcacctacgagttcgtgatgacactgcacaaagaggactacatcaagatcgtcaccgtggacgacaaggtgtacgagggctacatcatccagtgcgacatgcccagaggcaagttcgtgttcagaaacagcgacaactccgccgtgttcagcgtgaaaaccgataccttcgagcccggcgacttcattgtgatcgatggcaacctgtgcaaagtcatggactatctggccggcaagctgcgggctctgtctcccaatggaatcgtggaagaggtggaagccgtgaagaagcagacccggaagggaaagcagatccagaccatcgataagtacgagaagcggagcaagcagaaaaccatcaacatcggcacagtgaagaacctgcagaaattccagatcggcgtgctgggcgacatgtctgaagtgaagagtggacacagagcccctgtgtgcgccatcaagctgcagagcgagaagagaaaaggccggaagcagcccaagcggaacaagaatggactggccaatcctagcaccaacgagacaatgggatcc

SEQ ID NO: 188 - DNA, 4422 bp, Artificial Sequence
  OMNI nuclease sequence
ggtaccaagaagatcctgggcctcgacctgggcaccaattctattggctgggccgttgtgaatgaggccgagcatgtggatgagcagagcagcatcgtgaagatcggcgtcagagtgaatcccctgacagccgacgagctgagcaagttcgaggaaggcaagagcatcaccaccaacgcctacagaaccctgaagagaggcatgcggcggaacctgcagcggtacaagctgagaagagaacatctgctggccctgctgaaagagaagggcttcatcagcgaggaaaccatcctgagcgagagcggcaacagaaccaccttcgagacatacagactgagagccaaggccgccaccgaggaaatcagcctggaagagtttgcccgggtgctgctgatgatcaacaagaagcggggctacaagagcaaccggaaggccaagaataccgaagagggccagctgatcaacggcatggaaatcgccaagcggctgtaccaagagaatctgacccctggccagctgtgttggcagctgctgcaggatggaaagaagtccctgcctgacttctacggcagcgacctgcagagcgagttcgacaaggtgttcgagttccagcggcagtactacagcttcctgaccgatgagctgaagaaagagctgagcggcaagaacgataaggccgtgtgggccatctgtgcccctagcaaagagaaagagagcagcgacgagaagttcgtgtggaaatgggtcgagacagtgaccgagtgggacgaagagacaagcgccaaccagaccgtggaaaaagtgaaaaccctggaaggcctgaaaagagagggcaacaccgccgagcggaagcgcgaaaattatgagtggcggagcagagccctggaagaacagctgtctcctgaacagctgatcgtggtgttccaagagattaacaagcagatcaacaacgccagcggctacctgggcaacatcagcgacagatccaaagagctgtacttcaccaagcagaccgtcggccagtggaagatgaagaagctggacgaggaccccaaccacagcctgaagaacaaagtgttctataggcaggactacctggacgagttcgagaagatctgggagacacaggccaagtaccacagcgagctgaccccagaactgaaaaaagaagtgcgggacatcgtcatcttctaccagcggcctctgaagtcccagaagggcctgatctctatctgcgagctggaagggaagcagatggaatttgagaaagagggcaagaacaagctggtcacaatcggccccaaagtgtgccctaagagcagccctctgtttcaagagttcaagatctggcagcggctgaacgacgtgcaggtcgtgaatgccgagggcgagagaagattcctgaaccagaacgagaagaacgtcctcttcgaggaactgaactaccgcgagaagctgtccaagaccgagacactgaagctgctgttcgataagaagcacaaagagtacgacctgaacttcgaaggcctggacggcaatagaacccagagcgagctgtttaagacctaccagaaaatcatcgagatgaccggccacggcgagtacgactttagcaagatgtctgccaaggccaaggtggaactggtcaccgagatctttgaaggactgggcttcaataccgagatcctgaccttcgacagcagcatcaaggacaagaaagagttcgagcagcagcccttttaccagctgtggcatctgctgtatagcttcgagggcgataagagcgtgctgggcaatgagaagctgattgagaagatcagcgagatgtacggcttcgacaaagaaagcgccacagtgctggccggcgtgatctttcagcctgattacggctctatcagcgccaaagccatcagaaagatcctgccagacatgatgcggggcgacaattacagcaccgcctgtgaaaaggccggctacaaccactccaagcggagcctgaccaaagaggaactggaaaagaaagtgtggaaggacaagctggacctgctgcctcggaacagcctgagaaaccccgtggtggaaaagatcctcaaccagatgatcaatgtggtcaacgctgtggtggacgcctacggcaagcccgatgagattagaatcgaactggcccgggaactgaagaagtccgccaaagaacgggacgaactgaccaaggccatcaacaacaccaagaaacagcacgacgtgtacacaaagaagctgcaagaggaatttggcctgacacacgtgtcccggaacgacatcatcagatacaagctgtatgaggaactgcggagcaatggctacaggaccctgtacagcaacacctacattccccgggaagaactgttcagcaagaagttcgacatcgagcacatcatccctcaggccaagctgttcgacgacagcttcagcaacaagaccatcgaggcccgggacgtgaacatcaagaaaagcaacatgaccgcctgggactacgtggtgctgaccaacaatgagggctacgccaacaacgagtacaagaacagagtggaaaagctgtttgccgacaagatcatctccaagagcaagcgggacaagctcctgatgagagaggtggacatccccagcgacttcatcaacagggacctgcgggatagccagtatatcgccaagaaggcccgcgagattctggaaggcatggtcaagtttgtggtgcccaccaccggctccatcaccgatagactgagggaagattggcagctcgtggacgtcatgagagagctgaactgggataagtacgaccggctgggcatgacctactacgagcaggatagagatggccggcagatccccaagatcaaggactggaccaagcggaacgatcacagacaccatgccatggacgccctgacaatcgccttcacaaagcggagcttcatccagtacctgaacaacctgaacgccagagtgcagaaaggcgtggacgagtggatcgacctggataccgtggaactgtctaagctggacaaagagcagcggaccagcgtcgtgtacgccatcgagaagaaagaactgtaccgggactcccacggcaagctgaggttcaaccctcctaacctgacaaacaaccgggatatcgagcaacagctgagccagtttcggagagaagccagacggcagctggaaaacgtgctggtgtccatcaaggccaaaaacaaggtcgtgaccagaaacgtgaacaaggctaagaacaagagcggcgagtataagatgcagctgacacccaggggcaagctgcacctggaaacagtgttcggcagccagaaccgctacgtcaccaaagaagagaaagtcaacgcctccttcgacgccgagaagattaagaccgtggccgtgaagcggtacagagaagctctggtggctagactggcccagtatggcggagatgccaagaaagccttcaccggaaagaacaccctggacaagaaccccgtgtgggtcaacgcccagcagtctgagaaggtgcccgaaaaagtcaagaccgtcgagtttgagaaaatctacaccatccgcgaggaagtgacccctgacctgaagatcgataaggtggtggatgcccacattaagaaaatcctgcagaaccggctggccgaatacggcggcgacgccaaaaaggccttctccaatctggaagagaaccccatctggctgaacaaagagagagggatctccatcaagagagtcaccatcgagcggatgggcaactatatcgccctgcacgacaagagagacaagaacggcaacctgacactggacgagaatggcaagaaactgcccgtggatttcgtgtccaccggcaacaatcaccacgtggccatctacagaaagcccgtcctggataagaacggcctgcctgtgctgaatgagaacaacgaggtggaatacgaactggacgaaaagatcgtgtccttctacgaggccgccagcagagctatgcttggactgcctgtggtcgacaaagagtatagaaagagcgaaggctggcagttcctgttcaccatgaagcagaatgagtacttcgtgttccccagatacgagagctacatcgacagcgagggcaaagaggcccagcggatgatcttcaaccccaccgaatacgacgaggcctggtacaagaatcctgagaactacgccctgatcagccccaacctgttccgggtgcagaagttcagctacaagaactacgtgttccggcaccatctggaaaccaccatcgacctgtccgagtacaacctgagaggcaccacctgggtcgacttcagatccagcaagtggctcgataagatcctgaaagtgcgcgtgaaccacatcggccagattgtgtctgtgggcgagtacggatcc

SEQ ID NO: 189 - DNA, 4560 bp, Artificial Sequence
  OMNI nuclease sequence
ggtaccctgatgaagaagatcctgggcctcgacctgggcaccaattctatcggatgggccgtgattggcgccgagagcgagaaaagagatgacggcagcgagtacctgaagcctgagtctatcgagatggccggcagcagaatcatccccatggatgccagcatcctgggcaacttcgatgccggcaattctgtgtcccagaccgccgatagaaccggctacagaggcacaagacggctgagagagcggttcctgctgcggagagaaagactgaacagagtgctggacctgatgagcttcctgcctgagcactacagcagccagctggacagatacggcaagttcatcagccccgacatcgagcctaagctggcctggaagcctagcatcgacggcaagaacgagtttatcttcatggacagctttctcgagatgctggccgacttcagacagtaccagcctgagctggtcaaagagggcagaaagatccctctggactggaccatctactacctgcggaagaaggccctgaccagacctatcagcaatcaagagctggcttggattctgctcaacttcaaccagaagcggggctactaccagctgagaggcgaggaagaggaagagaaccccaagcagaaggtggaatattacagcctgaccgtcgtgggcgtcgaggactctggcgataagaagggcagcgacatctggtacaacgtgcacctggaaaacggctggatctaccggcggagcagcaagtatcctctggattgggtcgacaagaagaaggacttcatcgtcaccaccgctctggacgacaacggcaaccccaagaccgacaaggacggcaacgtgaagagaagcttcagagcccctaaggacgacgattggaccctcatgaagaaaaagaccgagatggacatcgaccagagcggccacaccgtgggcgagttcatctatgacagcctgctggctaaccccgaccagaagatcaagggaaagctcgtgcggaccatcgagcggaagtactacagacaagagctgagccagatcctgaagaagcagcaagagttcaacaagaagctgcaggacaaagaactgtacacccggtgcctcgaggaactgtaccccaagaatgagctgcatcggagatgcgtgtccgtgcgggatttcgcctacctgttcatcgacgacatcatcttctaccagcggcctctgaagtccaagaagtccctgatcgacgactgcccctacgagaagtaccactacctggacaagggcgtcgacgtgttcagacccattaagtgcgtgtccaagtctcaccctctgtaccaagagttccggctgtggcagttcatcgataacctgagaatcctggaacggaccaagctgatcgatggcagactccagtccgatgtggacgtgacagcccagttcctgaaggacaacgacgactacgctgccctgttcgacttcctgaacaaccggtccagcgtgaaccaggacgtgctgctgaccaagtacttcaacatcaagaagccccgccagaaagacgccgtgattccctacagatggaactacgtggaagagaaagagtatccctgcaacgagacacgctctgccatgctggctggcttcaagaaggccggcattcctcaagaggtgctgaccacagagatcacagaggccctgtggcacatcctgtacagcatcagcgacaagcaagaactgggcaaagccctggatagattcgccgagaagaacagactggacaagtccttcgtggacgtgttctccaagatcaagccctacgatagcagctacggcgcctactctgccaaggccatttctaagctgctgcccctgatgcggaggggcaagtactggaacctgaacgccatcaatcccggcaccagacagcggatggaaaagatcatcaacggcgagttcgacgagagcatcagcagcagagtgtgggagaagtccgccagcctgaaaaccgagacagattaccagggactgcctctgtggctggcctgctacgtggtgtacaacagacacagcgagacaggcgagatcgtgaagtggaacacccctaacgacatcgacgtgtacctgaacagcttcaagcagcacagcctgcggaaccccattgtggaacaggtggtgctggaaaccctgcggacagtgcgggacatctggaagaaaaccggctccatcgacgagattcacgtggaactgggaagagagatgaagaaccccgccgacaagagggccagaatgagccagcagaatatcgccaacgagaacaccaacctgcggatcaagtccctgctggcagagttcgccaatcctcagttcaatatcgagaacgtgcggccttacagccccacacagcaggacatcctgaggatctacgaggattacgccctgagcagcctgaaggccgacgaccaggattatgagttcatccacaagatgagcatgaccgctcagcccagccacaacgatgtcgtgcggtataagctgtggctcgagcagaagtatatcagcccctataccggccaagtgatcccactggccaagctgtttaccagcgcctacgagatcgagcacatcatccctcagagccggtacttcgacgacagcttcaccaacaaagtgatctgcgagtccgagatcaacaagctcaaggacaagcagctgggctacgagttcattaagaaccacgccggccagaaggtgcagatcagccagacaggacagtttgtggaagtgttcagcatccccgccttcgaagagttcgtgaagcagcactactctggccccaagctgaagaaactgctgatggacgacatccccgatcagtttatcgagcggcagatgaacgacagccggtacatctctaagctgatcaagggcctgctgagcaacatcgtgcgggaaaagacagagagcggcgattacgagcctgaggccatcagcaagaatctgatccccagcaacggccagatcaccgacagactgaagaaagattggggcgtgaacgacgtgtggaactccatcatcctgcctagattcgtgcggatgaacgagatcaccggcaccaccggcttcaccgccattaaccagaaaggacacgtgatccccgccatgcctctggaactgcagaagggctttaacaagaagagaatcgaccacagacaccacgccatggacgccatcgtgatcgcctgcacaaccagggaccacatcaacctgctgaacaacgaggccgcactgagcaagaaccagagcaacagatacgccctgtctcggaagctgagaagatacgagagcgtgcagatcgagaagcacggcgagaagaaaacaatcgaggtggccagagagttcctcctgccttggcctaccttcgccaccaataccagatctgccctggacaatatcgtggtgtcctttaagcagaacctgcgggtcatcaacaaggccaccaaccgctacctgcacttcaacgagatcggcgtgaaagtgaacgagaagcagaccatcggcaacaacatggccgtgcggaagcctctgcacaaggataccgtgttcggcatggtcaacctgaagctgaaaaagcaggcctctctgaacgacgccctgaaggctccttctatgatcgtggaccccgccatcaaagaacgggtgcacaatatgaaggacgccggcttcgacaccaagcagattaagaacgagctggaaaaggatggcagcatctccggcaagatcgaggtgtactacttctccaacggcaccaacgagcggtactttgccaccagaaagcccgtggacagcagcttcgacgaaaagaccatcctgggaagcgtgaccgatacaggcgcccagcagattctgcttgcccacctgagcagatgcaacaacgaccccgagatcgctttcagccctgacggcatcgagcagatgaatcgggacatcagacagctgaacggcggccacgatcacaagcccatcttcaaagtgcggaagtatgagaaggccgataagttcgccgtgggccagaccggcaacaagcggtctaaatatgtggaagccgccaagggcacaaacctgttcttcgccatctaccggaccgagacaatcgacaaagaaaccggccggaccgtgtttggcagagcctttgagacagtgcccctgaacgtggtcatcgagagactgaaacagcatctggcccctgtgccagagcagaacgagaatggcgatagactgctgttctggctgagccccaacgatctggtgtacgtgcccacaccagatgagatcgagactggccacatcagcgagcctatcgacaagcggagcatctacaagatggtgtccagcagcggccctcagtgcttctttatccaagagagcattgccacgcctctggtcaacaaggtcgagttcagccctctgaacaagatggaacggtctatctgcggcgccatgatcaaagaatgctgcatccctatgaccatcgaccggctgggcgagatcagcttcaaacagggatcc

SEQ ID NO: 190 - DNA, 4425 bp, Artificial Sequence
  OMNI nuclease sequence
ggtaccgacaacatcctgggcatcgacctgggcaccaatagcatcggcctgagcctgcggaacaccaacttcaacggcagcatccagaaccagctggaatacttcaccagcatcatcttccccagcggcgtcggaaagggcaagagcggagaattttcttacgccgccgagcggaccaagcacagaagctctagaaggctgtaccaggccagacggtacaagaagtggaaaaccctgggcctgctgatcgagaacgactactgtcccctgagcatggaagatctcgagaagtggtctaagtacgacaaggccaagggcctgaagcggcagtatcctatccacgccaccaatttcgagcagtggatcagactggacttcgacggcgacggcaagcccgattacgccaatccttatgagctgcgggccgagctgatggaaaagcagttcgacttcaccaagcagaccaaccggtacaagctgggcagagccctgtatcacattgcccagcacagaggcttcaagagcagcaagggcgagacaatcaaagagcaagagcagaacgagaaggacaatatccaggacttcgatctggccgaggctctgaagaagtccgaggaaaagaagtctggcaagctgagcgagtacatgaagaagtacaacctgcctaccgtgggctgcgcctacgctcacctgagaaagaatggcatcagagtgcggaacagcatctaccaggctgtgcggagccagtacaaggacgagatcaagcagatcttcgagtaccagaacggcctggacaagaacagcgacttctacaagcggctgctgtccgagaagaaaggcgagggcaccatcttttacaagaggcccctgagaagccagaagggacagatcggctactgcaccctggaacctaacaagcctagatgccccatctctcaccccgagttcgagaagtttagagcctggtgcctgatcaacaacatcagattcggcgaggacctgaaagagacactgacactggaacagaagagagagctgttccacgagcggtttctgctgaccagaagcagcttcaagttcgaagagatccggaagtggatcgagcgggaaaccttcatgaggctggactataaggccaagaccatcaactacaaggataagaccaacgtgtccggctgtcccatcagcggcagactgaaaaacctgctgggcgaagattgggagaagtggatgtgcaagaccggcatcaccaaagtgattaagcagaagaaggacggcaagtacaccgagagacaggtggaaatcggctacagcagctacgacctgtggcacatctgcttcagcttcgacgagcccgagaacgtggaaacctttgccaaagagaagctgcacttcgacgacaagcaggccaagcagctcgtgcggatcttctttgccatccagcagggctactccatgctgagcctgaaggccatcaagaacatcaaccggtttctggaagagggcctgatctactccgatgccgtgctgctggccaagctgcccgacatctttaaggacagatgggccatcgagaaggatgccatcgtgtcccagatcgacctcgtgattgagaacaaccggaagcagaagctgctgttcaacatcgtgaacaccctgatcgccaattacaagagcctgggctacgacgacgagatccagttcaacgagagattcgccgaccacaacaccacctacaagctgcagcccagcgactacaacgacatcaagaccgtgaccatcaaggccatcggcgaaaagacctgggccaagaaggatgaggaaaagcaaaaggccatcctggaacaggtggccgtgctgtatcagaacttcttcgccagcgagcagcgggactactataagctgcctaaggtggccgacgacctggccaaactgctgcacgagaagtataactttctgcaagagaaggacctcaagaagatctatcaccccagcatgatcgagttctacgccagcgccaaagaacagcacctggacgacggaagatggatgaagctcctgggctctcctgtgatcggcgccttcaagaaccctatggccatgagagtgctgcacgtgctgaagaagcagatcaacgaactgctgaaggcctctctgatcaacggcgaagagacacggatcgtggtggaaaccgccagagagctgaacgacgccaacatgcgctgggccattgagacataccagcgggaaagagaggccgagaacaaagagtacgagaagatcctgaacgagtacttccccaaccgcaacatcaacgacaaagagatcgagcaggccaggctgatgtgcgagcagcacgatatccctgagagcgacatcctgcagcagaaagagaaaatcgacaaggacaagacgctgaagtccctcatctacaagaaagacctgaccaagtaccggctgtggctcgagcagggctgcagatgtatctacaccggcaagatgatcaacatcaccaacctgttcgacgagaacgcctacgacttcgagcacacaatccccagaagcctgagctttgacgactccctggccaacctgaccatctgcgacgcccactacaacaggaccatcaaacagaaccagatgcctacacagctggccaactacgataaggacgccaacggctacaccgccatcctgcctagactgcagccttggatcgataaggtggaacggctgaaggacaacgtcgagttctggaaaacacagtccaagcgcgcccaggacaaggaccggaagaatcagtgtatccggcagcagcacctgtggaaaatggaactggactactggaaggccaaagtggaccggttcaccatgaccgaagtgaccagcggcttccggaacaaccagctgaatgacacccggctgatcaccaaatacgcctaccactacctgaaaaccgtgttcaacaaggtggacgtgcagaaggggaagatcaccagcaacttcagaaagatcctgggcgtgcagagcaccgacgagaagaagaacagagacaagcacagccaccacgccatcgacgccaccatcctgacaatgattcctagcgccgctcagcgggacaagatgctggaaatcttctataagatccaagaggaagagaaactccaccgggacaccaccgtgctgaaaaaagaactgaacaaagaaatcaagaagtgcaatctgcccacgaacgtgtccctgattgcccctttcatcgagaacaatatcctcatcaaccacgtgtccaaggaccagactctgacccctgctcacaagcggaagcggatcagaggcaaaatcgtgcccctgagggatgccgacggcaccatcatctacgagacaaacgccgacggaaccgtgaagaaaaacaaatacggacaccccattccgaaagccaaacagtggattaccggcgacagcatcagaggccagctgcacaaggatagcttttttggcgccatcaagtaccccatcattgacaaagagggcaagcccaccagaaagaacggcagcttcatctatgagaaagagtccaacggccaggacgtgatcagcatggtcatgagggtgcccatcaccagcttcaccaaagaggacgagctgaagaaaatcgtggaccccaccatccgggcctctatcgccaagacaatcgccaagcgcaaagaggaaggcaagagcttcaaggccgccatcgaggaacctatctggctgctggacaaggatggcaatgagatcaagatcgacaagaacggactgcctatcagccccatcagacacgtgcggtgtaaagtggccgctggcagaggctttttcaccaaggacaaagccatcgaagtgaaagagcagacataccccagcaagtacccgtacaagaatatctactacgcccagaacgacggcaactacctgtgtctgctgtacgagggcgtgaaaaagggcaaagtcgtgcgccagttcaagttcatcaattacttcgagactatctccctggggatcaagaataccaacagcctgtacagcgagccgtacttccagaagatcgaggacagaaagacagagctgaagctgtccgccgtgatcaagacaggcacccacatcctgatgtggaaggacagccctgacgagctggaatccctgaccaatgagcagctgagcagacggctgttcgtggtgtacaagttcaacctgaagggcgccaactgcatctacctggaaaatcacctggaagcccggaacgagatccctcagaaagaggactacaccatcttcgacaccaccaagtatcaggcccggctgactctggtggccaatggcttcaactgcctgatcgaaaaccgggacttcaagatcaacgccattggcaacatcgagtggctgggatcc

SEQ ID NO: 191 - DNA, 4512 bp, Artificial Sequence
  OMNI nuclease sequence
ggtaccaagagaatcctgggcctcgacctgggcacaaattctatcggctgggccgtcgtgaagtccgagaacgtggaaggcaaagacgtgctgacaggcatcgaaggcgccggaagcagaatcatccctatggatgctgctcagctgggcgacttcgacaagggcaatacccagagccagaccaaggacagaacccactttagaggcgtgcggcggatcagagaaagaagcctgctgcggagagaacggctgcacagagtgctggatgtgatgggctttctgcctcagcactacgccgaggccatcgacagatacggcaagttcgtgaaccacgaggaacccaagctggcctggacaaaggatgagagcggcaagatgaagttcctgttcgaggacagcttcagagagatgatcgccgagttccggaccgccaatcctgactttctgaacgaaggcggcaaggtgccctacgactggaccatctactacctgagacagaaggccctgcaccagcctatcagcaaagaggaactggcttggattctgctgaacttcaaccagaagcggggctactaccagctgagaggcgaggaagaagaggacaacaagaagcggagcgagtactgcgccctgaaggtgctgtctgtggaagataccggcgagaagaagggcaaagacacctggtacaacgtgcacctggaaggcggcctgatctacagacggacatctgccatgcctctggaatgggagggccagacaaaagagttcatcatcaccaccgagtacgacgacaacggcaaccccaaagaggacaaagagggcaacatcaagagaagcttcagaatgcccaaggacgacgactggtccctgctgaagaagaaaaccgagagcgacatcgagagcagccaggtgtccgtgggccagtatatctacgccgctctgctgaaaaaccccaagggcaagatcagaggcaagctcgtgcggaccatcgagcggaagtactacaagcaagagctgaacgacatcctgcggagccaagagagatttcaccccgagctgagagatgccgacctgtacagcagatgcatcaacgagctgtacggcagcaacgagagctaccggaagtctatcgccgccagagacttcgtgtacctgttcgtggataacatcctgttctaccagcggcctctgaagtccaagaagtccctgatcgacaactgccctctggaaagctaccactgtcatgcccaggatggcgacgtgcagaaagctcccatcaagtgtatcgccaagagcgcccctctgttccaagagttcagactgtggcagttcctgagcaacctgcggatctaccagagggaaaaagaagtgaacggcaagctgctgaccgacgtggacgtgaccaatgagtttctgagcagcgaggacgactacgtgcggctgtttgagtacctgaacggcatcgagacaatcaagcaggacaccctgctgcagaaacacttcaatgtgcagaagcccaaaggcaagaacgccaaactgccctaccggtggaactacgtggaagatcgggaataccccgccaacaagaccagaggccagatgctggctttcctgaagagagccaacatcagcgccggctttctgacccctgacatggaagaaaggctgtggcacctcctgtactccatcgacgataagcaagaactgcacaaggccctggccacctttgcctctagacatggactggcccagaccttcgtggaagagttcgccaagtttcctccgttcaagaaagagtacggcgcctttagcgccaaggccatcaaaagactgctgcccctgatgcggatgggcagcagatggaacgagaaggacatcgacgaggccacacaccagcggatcgacaagatcatcgatggcgagtgcgacgaaaccatccgggacagagtgcgggaaaagagcatccacctgaccgacatcagacagttctctggcctgcctctgtggctggcctcctacatcgtgtacgatagacacagcgaggccagcgagacagccagatgggagacacccgacgatatcagccggttcctgcaagagtttaagcagcacagcatgcggaaccccgtggtggaacaggttgtgaccgagacactgagaaccgtgcgggacatctggaagcagtacggcaacatcgatgaagtgcacgtggaactgggccgcgagatgaagaatcccgccgacaagagaagaaagatgaccgagagagccctggaaaacgagaacaccaacctgagaatcaaggccattctgatggaactgatgaaccccgacagcggcgtggaaaatgtgcggccttatagcccctctcaacaagagctgctgagaatctacgaggaaggcgtgctgggcagcgagaggattctgcccgattttgtggaagagacactggccaagttccggcagagcgatagcagcaaatgtcccagccacgccgaagtgatccggtacaagtgttggctggaacagaagtacagaagcccctacaccggcgagtctatcagcctggccagactgttcacccctgactacgagatcgagcacgtgatccctcagagcagatacttcgacgactccttccagaacaaagtgatctgcgagagcgaagtgaacaagctgaagggcaacctgctgggctacgagttcattgagaagcaccacggcgagaaagtgaccctgacaggcggcaaagtggtcaccgtgtttgaggtgccagcctacgagcagtttgtgaaggacacctacgccaacaatcccagcaagatgagaaacctgctgctggacgatatccccgacaagtttatcgagagacagatgaacgacacccggtacatcagcagctacgtgaaaaccctgctgtccagcctcgttagatgcgagggcgagcaagaggccgtgtccaagaatgtgatcgcttgtacaggcggcgtgaccgacagactgaaacacgattggggcgtgacagaagtgtggaaccacatcatcctgcctagattcgagcggctgaacgatatcacaggcacccaagagtttaccgccaagtccgccaatggccacacaatccctgccattccactggaactgcagcggggctttaacaagaagagaatcgaccaccggcaccacgccatggatgccattgtgatcgcctgcgccaaccggaacatcgtgaactacctgaacaacgagtccgccagaaagggcgctgccatctccagatatgacctgcagcagatcctgtgccacaaagagaaaaacgactccggcagccagtgggtcgtgaacatgccttgggagtcctttccagccgacgtgaaggccacactggaaaacatggtggtgtcctttaagcagaacctccgcgtgatcaacaaaaccaccaaccactaccaagtgatcgaggacggcaagaaggtggtcaagacccagacaaagggcgactcttgggccatcagacggtccatgcacaaggacacagtgttcggggaagtgaacctgaagcggatcaaagaagtgggaatcaacgaggccttcaaagaaccccagaggatcgtggacaaagaactgaaggccaaaatgctggccatgaagcagctgggcttcgatctgaaacgcgtgaagcagtatttcgaggaagagaaggatacctggcaggacgtcaacctgaagaaaatccccgtgtactacttcaccaaagagactaacgaccggttcttcgccaccagaaaagccctggacgagagcttcgacgagaacaagatcaagaatcacatcaccgacaccggcatccagaagatcctgcttagacatctggccgccaacggcaatgaccctaagctggcattcagccccgagggcatcgaggaaatgaacagaaacatcgtggccctgaacaatggcaagagccaccagccaatctacaaagtgcggtggtacgagaagtccgataagtttgccgtgggcaccgccggctgcaaggccaaacagttttttgaggccgacaaggggaccaacctgtttttcgccatctacgagaaagaaaccctcggcgaggatcaccgggttgtgcggacaagaagctacgccagcattcccctgaatgaagtgattgagcggcagaaaaagggcctgcctagcgctcctgagaacgaagagggaatgcaggccacatacgtgctgagccccaacgatctggtgtacgtgccaagacagggcgaagagatcaccgatgtgaaccagatcgataagaaacgcatctacaagatggtgtcctgtacctccggcgagtgccacttcatcccataccaggtggccaacattatcgtgaacaaggtcgagttcagcgcccggaacaagatggaaagagccatcacaggcgagatgatcaaagagatctgcatccccatcgagatcgaccggctgggcaatatcagactgaacagaagcggatcc

SEQ ID NO: 192 - DNA, 4479 bp, Artificial Sequence
  OMNI nuclease sequence
ggtaccagcaagatcgtcggcctggacctgggcacaaattctatcggatgggccgtgatcgacaacgagcagaagcagattgaagccgccggaagcagaatcatccccatggatgccgccagactgagcgacttcgagaagggcaattctgtgtcccagaccgccgacaggaccaagtacagaggcatgcggagactgagagagagatacctgctgcggcgggaaagactgctgagagtgctgtctgtgatgggcttcctgcctgagcactacgccagccagctgaacagatatggccatctgcctgaggacaatgagccccggattgcttggagagagggcaaagacggcaagcccgagttcctgttcagaaccagcttcagcgagatggtggacgagttcagaaaggccggaatcggccagaacatcccctacgactggaccatctactacctgcggaagaaggccctgacactgcccctgacaaaagaggaactggcctgggtcctgatgcagttcaaccagaagagaggctacaaccagctgagaggcaaggccgatgagagcatgggcgacgatacagacaagggcgaagagaaagagtaccacgagctgaaagtgatcaaggtggaagagacaggcgacaaggacaagaaaggcgtgtcctggttcaacatcgtgctggaaaacggctggatctaccggcgggtgttctctatcgctcccgactgggagggaaaagtgcggggctttatcgccaccttcaagctggacaaagagggcaacagaaaagagggcgagcagcccagactgaagtcccctgatgagaacgactggggcctgagaaagatcaagaccgagaacgacatcaagcagagccagtgcaccgtgggcgagtacatctacaagaccctgctgaacgaccccaccagaaagatcctgggagagacagtgcggaccgtggaaagagagctgtaccaagaagaactgcaccgcatcctggaaaagcagagagagttcatccccgagctgaatgacaaagaactgtacaaccggtgcatcgaggaactgtaccccgccaacgaggcctactgcaactctatcgccaaccggggctttgtgtacctgctggccgacgacatcctgttctaccagcggcctctgaagtccaagaagtccctgatcgccgactgtccctacgagagcagaaatggcaagcctatcaagtgtatcgccaagtctcaccccgcctaccaagagttccacctgtggcagtttctgagcaacctccaggtgtaccaggacgacaccaagatcaccagcacactgctgcccgatggcaatgcctacgccgatctgtatgatcacctggccaagcagaaagagatcgaccagaacggcctgctccggtacttcaagatcggacggaaagaggtgtccaagtaccggtggaactacgtgcaggacagaaagtacccctgcggcgaaacaagagccgtgctgcttggaggactgcacaaggctggcatcgacgagaagtttctgacacccgagaaagagctgcacctctggcacatcctgtactccatcgacgaccagagacagtacgagaaagccctgaacaccttcgccagaaagcaaggctgggatgcccaccagtgtgaagccttcgtgcagagcttcaagcggctgaccctgtgcaaagagaaggactacggcgcctacagcgccaaggccatttctagactgctgccagtgatgcggagaggcagatgctggaacgccgaggaaatcgacacccagaccagagagagaatcgagcacctgatcaccgccgaagaggatgagggcctgacaacaagcgtgcgcgagaagctgaagcacatcagatccatcgaggactgccagggcctgatgacatggcaggcctgttacctggtgtacggcagacactctgaagccgctgaggcccagaaatggaccagacctgaggatatcgaccgctacctggaagagttccggcacaacagcctgaacaaccccgtggtggaacaggtggtcaccgagtctctgagagtcgtgcgggatatcctgagacagaccggcagaatcgatgagatccacatcgagctgggcagagagctgaaaaagaccaaggccgaaagagagagcctgagccggaccatcctcgagaacgaaaccaccaaccagcggatcagaaagctgctgaccgagctgatgaaccccgagtgccaggtggaaaacgtgcggcctaatagccctagccagctggaactgctgaagatctatgaggacggcgccatgaacagcgtggccgatgtgcctgaagagatcaaagagatccagaagcggttcagcgccgccaagaatcagcctacacacgccgaagtgatgaagtacaaggcctggctggaacagcactacatcagcccctataccggcaagtttatccctctggccaaactgttcacaccagcctaccagatcgagcacatcatccctcagagccgttggttcgacgacagcatgagcaacaaagtgatctgcgaggctgaagtgaacaagctgaaggatagagagctgggccacgagttcattgtgcaccaccatggcgaaagggtgcccctgtctatgggaagagatgtggaaatcctgagcgtggacgcctacgagaagctcgtgaaggacacctttgccaacaaccggaagaagcgcgagaaactgctgatggacgatatccccgaggacttcgtgaaccggcagctgaacgattcccggtacatcagcagactgatgatgcatctgctgtccaacatcgtcagagccgaggacgaggacggcaatcaagaggaaagcacaaccagccggaacgtgatcccctgcaatggcagcatcaccgatagactgaagcacgattggggcatcgatgacgtgtggaaccggatcatcctgcctagattcgagcggctgaacaacatcaccaacacacccgtgtacaccgccaccacagagagaggacatctgatccctcaggtgccactgcacatgcggcagggctttaacaagaagcggatcgaccacagacaccacgccatggacgccatcgtgattgcctgtgccaccagagatcatgtgaacctgctcaacaatgaggccgccagatccagcatgagatacgacctgaaccacaagctgcggatcatggattactacctgggcgccgatggccagaagcacgagagattcggcgagttctacaagccttgggagacattcaccgaggacgtgcagagaagcctggaaggcatcatcgtgtcctttaagcagaacctgcgcgtgatcaacaagaccagcaaccactacaccatcatccaggataacaagcacgtgaacgtgaagcagaagaagggcgactcctgggccattcggaagcccctgcacaaagaaaccgtgttcggcgaagtgaatctgcagctgaccaagcgggtgcccatcaaaaaggccctggaagatatcaacagcatcgtggaccgggaactgaaagagatgatcaaggccaagaaaaagctgacccacaccaacaagcagatcgaggaatttctggtcaagaacaaggacatttggagcgaggccgccgacggcaagatcgaggtgtactactacaccgccgataccaacgacagatacttcgccacacggaagcctctgctggacgtgatgaaggacattgccacagagcctgccgctcagaaggccatcgatagcattacagatagcggcatccggtccatcctgagagcccatctgggagccgaaaacaacaatcctgccgaggccttttctgccgacggcctggaacggatgaaccggaacattaaggctctgaacggcggccacgaccatctgccaatcaagaaagttcgggtgtacgagcaggccaacaagttctctgtgggcaacaaggggcagaaagccaccaagtttgtggaagccgccaagggcaccaacctgttcttcgtgatctacaccaacagcaacggcaccagaggctacgccaccgtgcctctgaacatcatcattgagctgcagaagaaatacgagaaggattgggaagcccacctggccgagagactgcaaggcgaagatctccagctgatgcctaagggcgccaagctgctgtatgtgctgtctcctggcgatctggtgtatgtgcccaccgaggaagaacacaagaacggcatcgagaacgtggacaccaccagaatctacaagtgcatcagcgccaccgagcggacctgcctgtttattccttactccgtggccagcatcattctgcccggcaaagagtacgaggccaaaaacaagatggaacgggccatcaccaaagaaatgatcaaagaagtgtgcatccccatccaggtggaccggctgggcaatatcacaaagatcggcggatcc

SEQ ID NO: 193 - DNA, 4704 bp, Artificial Sequence
  OMNI nuclease sequence
ggtaccaaagagaacaccaccaacagcgccaagaccatcctgggcctcgatctgggcacaaattctatcggctgggccctgatcaagcacgacttcgagaagaaagagggcgacatcctgggactgagcagcagaatcatccccatgagccaggacatcctgtctgcctttggccagggccagaaagtgtctcagacagccgacagaacaggctacagaggcgtgcggagactgtaccagagagacaacctgcggcgggaaagactgcaccgggtgctgaatatcctgggcttcctgcctacacactacgccgacaacatcgatttcgagaagcacctgggccagttcaagaaagaagtgaagctgaactaccgcaagaccaaagagggcacccacgagtttctgttcatggacagcttctacgagatgctgcaagagttcaaaaagacgaaccccagcctcttctacaagaaagagaacggcgaggaaacaaagatccctctggactggaccatctactacctgcggaagaaggccctgaccgagaaggtgtccaaagaggaactggcctggattctgctcaacttcaaccagaagcggggctactaccagctgagaggcgaggaagagatcgaggacagcaacaagaacaagagcttcgaggaactgaaagtgtcaagagtggtggacaccggcgagacaatcaagagatctggcgaggccctgtacgacatctactttgagaacggctggaagtacgacaccaagaccaccaagcctgacaactggctgaacaagacccgcgagttcatcgtgaccaccagcacactgaaggacggcaccgtgaagagaagctacaaggccgtggacagcgagacagactggatcgccatcaaagagaaaaccgagcaagagattgcccggtccaacaaagaagtgggcgagtacatctacgagagcctgctggccaatcctacacagaagatccggggcaagctgatctccaccatcgagcggaagttttacaaaaaagagctgaaggccatcctggaaaagcagatcgagctgcacgacgagctgaaagacagagccctgtactacgcctgcattgaggaactgtaccccagaaacaacgcccaccggaacagcatcaaggataacggcttcgactacctgttcatcgacgacatcatcttctaccagcggcctctgaagtccaagaagtccaccatcagcaactgccagtacgagcacaccacctactggcggagaaacaatgagacaggcagcctggaaaaagtgcggaagcccctgaaggctatccccagatctcaccctctgtttatcgagttccggatgtggcagttcctgcggaacctgaagatctacaagcagcaggccaccagcgacatcgacgtgaccgacaagtttctggaaaacgagaacgattggtgcgacctgttcgacttcctgatgaaccggaaggacgtgcagcagaagcagctgatcaagtacttcatcgacaacaagacgatcgacaagagcaagtccgaggaataccggtggaactaccccgaggacgccacctatcctatgaacgacacaaaggcccagttcgtgtcccggctgaagaaagtgaaggacttcgacctgaaagaggacctgagcttcgattttcagatgaacctgtggcacatcatctacagcgtgaaggacaagcacgagtttgaaaaggccctggaaacattcgccctgaagaacgacatcgataaggacagctttgtggactccttcaagaatcaccctccttacaacagcgagtacggcgcctacagcctgaaagccatcaagaaactgctgcccctgatgagagtgggcagatactggaacagggacgacgtgctggaagaggccagcaatagaatccagagcatcgtggaacggatcgagcacctccagatcgacgataacaagcctctgaaagacgacaagctcaaagaggccattgccgccgttagcgacgatgaggtgcccaagcagttcatcagaagctttctgcccttcaaaaacaagaaccctctgagcggcctgaacacctaccaggcctgttacgccgtgtacgagagacacagcgaggtgtccgacatcagccagtggaagtccccagaggacatcgacaattacctggccgacttcaagcagcacagcctgagaaaccccattgtggaacaggtggtcaccgagacactgagaaccgtgcgggacatctggatgcacttcggcgaagagggcaagagactgttcaacgagattcacgtggaaatcggccgggacatgaagaacaccgccgatcggagaaagaccctgagcgacagaaacagagagaacgagcggaccaaccagcggatcaaagagctgctccaagagctgcagagcgagtacagccagcaggacatcagaccttacagccccagccaccaagagatcctgaaaatctacgaagagggcgtgtaccagaatcctcgggccagctttgatgtgctgagcgaggatgaagtccggaagatcagaaactccaacaatctgaagaagtccgatatcacccggtacaagctgtggctcgagcagggctacatcagcccatataccggcaggatcatcccactgagcaggctgttcaccgaggactaccagatcgaacacatcatccctcaggccagattcttcgacaacagcctgggcaacaaagtgatctgcgagagcgagatcaacccatctccatacaagggcaaccagaccgccatggagttcatcaagagaatgggcggcagcgtggtgcagctgaacaatggcagaggcaccatgcggatctttaagcagaacgagtacgaggaacactgcaagaactacttccggcagaaccggcggaagctggaatttctgctgattgaggacatccccgagcggttcagcgacagacagctgaacgatagccggtacatcagcagattcgtgaagggcctgctgagcaacatcgtgcgcgaggaaaatgagagagaggccacaagcaaggccctgctgacaatgcctggcgccgtgacagccaagctgaaacacgattggggcctgaacgacaagtggaacgagctgatcgcccctcggttcatccggctgaacgagatgaccaacagcaacgacttcggcttctgggacaactccatcaacgccttcaggacccaggtgccagacgagatcgagaaaggcggcttcgataagaagcggatcgaccacagacaccacgccatggatgctctgaccgtggcctgttgcaccagagaacacgtgcagtacctgaataccctgtccgccggcaaggataagtacgacctgcgggaaaagctgctcatcaagaacgagcacggccactacacaaagaccttccagctgccttggagaagcttccccgccgatgccaagaactccctggaaagagccatcatcagcttcaaacagaacctccgcgtgatcaacaaggccaacaacaaaacctggcagtgggtcaaagacaaaaacggcggctttaagaaagagctggtcaagcagaccaagggcgacagctgggccatcagaaagagcctgcacaaagaaaccgtgtcaggcgccgtgcagatcaagaggatcaagaagggcaccgccacactgaattactacctggacagacccgaactgatcgtggacaagaagatcaaagaaaaagtcatctacctgcacggggtgttccttggcgacctgaacaaaatcaaaaagcacctgagagagcaccctctgaagatcgacggcaaagagattaacaagatcaaggtgtacgagtggaccgagggcgccacagctactagaacccctctgtccgacaagctgaccagaaagcagctggacagcatcaccgactgcggcatccagagaatcctgaacaaccacctgaagaaatacgtggacgagaacgggaaagagcagttcagcctggcctttagccaagagggcatcgaggatatgaacgccaatatcgtggctctgaacaacggcaagcggcacaagcctatcagatccgtgcggatctacgaggaaggcaagaaattccccgtcagcgacaacaaaaactccgccaagagcaccaaatatgtggaagccgccaagggcacaaacctgttcttcgccatctactgggacgaagagaaacagaaacgggtgttcgagactatccccttcaacgaggtggtggaacaccagaagcagagagccacactgtctaaagaagtcatgaaggacaccctgtacatccccgtgaagcctgctctgggagagttcatcttcagtctgagccccaacgacctggtgtacgtgcccacagacgaggaaatggctaaccctagcctggtggatatcgacaacctgactcggaagcagattggcagaatcttcaccgtgaacgacttcagcggccccacaatctacttcacccctaatagcctggctaacaacatcaccgccaaagaggtggacctcaagatcgatgagaagtccggcaagctgcagggcagcttcgataccaagaccgccagcttcgagttcgtgcccatcaaggacacctgttggaagatgaaggtggaccggctgggaaacatcgtgtccatcattcggggatcc

SEQ ID NO: 194 - DNA, 4317 bp, Artificial Sequence
  OMNI nuclease sequence
ggtaccaagaagatcctgggcctcgacctgggcaccaattctattggctgggccgttgtgaacgaggccgagaatgctgatgagcagagcagcatcgtgaagctgggcgtcagagtgaaccctctgaccgtggacgagctgaccaacttcgagaagggcaagagcatcaccaccaacgccgatagaaccctgaagcggagcatgcggagaaacctgcagcggtacaagctgcggagagagaacctgatcaagatcctgaagtccagcggcttcatcagcaacgacaccatcctgagcgagaacggcaacagaaccaccttcgagacataccggctgagagccaaagccgccacagacgagatcagcctggaagagtttgcccgggtgctgctgcagatcaacaagaagagaggctacaagagcagcagaaaggccaagagcaccgaggaaggacagctgatcgacggcatggaagtggccaagcggctgtacaatgagaatctgatgcctggccagctgagcctggaactgctgaaaggcggcaagaagtacctgcctgacttctacagaagcgacctgcaggccgagttcgacaaagtgtggaacatccagaagcacttctaccccgaccagctgaccgatggcctgaaggatgagctgcagggcaagaacaagagccagacctgggccatctgtgccaagccttttggcatcgtgggcatcaagagaaccaccaagggcttcgagcagaagatcgagaacttccagtggcggtgcaaggccctgtctgaacagctgggactcgaggaactggccatcgtgctgcaagagatcaacggccagatctccaatgccagcggctacctgggcaacatcagcgacagaagcaaagagctgtacttcaaccaccagacagtgggccagtaccagatggcacagctggacaagaaccccaactacagcctgaagaaccaggtgttctataggcaggactacctgaacgagttcgagacaatctgggagacacaggcccggttccacaaagaactgaccgccgagctgaagaaagaaatccgggacgtcgtgatcttctaccagcggcctctgaagtcccagaagggcctgatcagcttctgcgagtttgagagccggcagatcgaggtggaagtggatggcaagaagcggcagaaaaccatcggcctgagagtgtgccctaagagcagccctctgttccaagagttcaagatctggcagcggctgaacgacgtggaagtgtccggcatgatcatccccaaccagcagcaggatctgttcggctacagcaaggactacaactacggcaagagatggctgctgcccgaggaaaaagagctgctgttcgccgaactgaactacaaagagaagctgagcaaggccgaggctctgaagatgctgttcccacaccagaaagaggtggacatgaactttaaagagctggacggcaatcggacccaggccgagctgtttaaggcctatcaggccattgccgagatgagcggccatgatgtgggcgatctgcagaagaaaagcgccaaagagatgcagcagtccatcagcgagatcttcgataccatcggcatcgacaccagaatcctgaccttcaacagcgacctggaaggcaaggatttcgagcagcagcccatgttcagactgtggcatctgctgtatagcttcgagggcgacaacagctccatcggcaacgagaaactgatcgagaagctgcacggcaccttcggcttcgagaaagaatacgccaccgtgctggccaacgtggtgtttaaagaggccggcgattacagcagcctgagcaccaaggccatcagaaagatcctgcctcacctgaaggacggcaacgattactctgtggcctgcgagtacgccggctacagacactctaagcagagcctgaccaaagaagagattgagaacaaggtgctgaaggacaagctcgaactgctgccccggaacagcctgagaaaccccgtggtggaaaagattctgaaccagatggtcaacgtcgtgaacggcatcatcgaggaatacggcaagcccgatgagatcagaatcgagctggcccgggaactgaagaagtccgccaaagaaagagaggaactgaccaagtccatcaatgagacaacccggctgcacgaggaactcgtgaagaaactgcagaacgagtttggcctgagccacgtgtcccggaacgacatcatcagatacaagctgtatgaggaactcaagaacaacggctaccacacactgtacaccgacacctacattcccagagagaaactgttcagcaaagagtttgacatcgagcacatcatccctcaggctaagctgttcgacgacagcttcagcaacaagaccctggaagccagacaggccaacctggacaagtccaacaccaccgccttcgacttcgtggccaccaaatacggcgaggacttcgccaacggcgactacaagaacagaatcgacaagctgctggacgacaaagtcatctccaagaccaagcacgacaagctcctcatgaaggaagccgacattccctccggctttatcaaccgggacctgcgggatagccagtatatcgccaagaaggccagagagatcctggaagaactcgtcagattcgtgctgcccaccaccggcagcatcaccgatagactgagagaagattggcagctggtggacgtgatgcaagagctgaactgggacaagtacaaccagctgggcctgaccgagatcattgagggcagagatggccagcggatcagacggatcaacgactggaccaagcggaacgatcacagacaccatgccatggacgccctgacaatcgccttcaccaagcggtccttcatccagtacctgaacaacctgaacgccagagtgcagaagggcgtcgacgactggatcgacctggacatggtggaatttgccgatctgaacaaagaggataagaccaaggccgtgtacgccatcgagaaaaaagaactgtacagagacaaccgcgggaagctgcggttcaaccctcctatgcctctgaatgagttccgggccgaagccaagagacagctggaaaacaccctgatctccatcaaggccaaaaacaaggtggtcacccggaacgtgaacgtgaccaagaagaagtctgggaagaacaaaaaggtgcagctgaccccaagaggccagctgcatctggaaacaatctacggcagcagcaagcgctacgtcacgaaagaagaaaaagtcaacgccagcttcgacgccgagaagatcaacatggtggccagcaaccggtacagagaagccctgatggccagactgaatcagtttggcggcgacgccaagaaagccttcacaggcaagaacgccctggataagaatcccatctggctggacgaactgcacacagcccaggtgccagagaaagtgaaaaccgtgggcttcgaaaccatctacaccatccgcaaagaggtgtccccagacctgaagctggataaggtggtggatgtgtccatccggaagattctggaagatcggctgaaagagttcggaggggacgctaagaaggcctttagcaacctggatgagaacccgatttggctcaacaaagaaaagggaatcgccatcaagcgcgtgaccatcaccggcatctctaatgctgaggccctgcacgataagtgcgacaaggatggcaacctgctcctggacgagaatggaaacaagcagcctatcgatttcgtgaacaccggcaacaaccaccatgtggccatctacagaaagcccaaactggacaaaaacggccagccagctctcgatgagaacgggaacattatgtacgaactggacgaaaagatcgtgtccttctacgaggccaccagcagagccatgcagcatctgcccatcatcgacaaagagtacaagcgcgaggaaggctggcagttcctgttcaccatgaagcagaatgagtacttcgtgttccccagatacgacgccgacggcaacatgacattcaacccactggaacacgacgaggcctggtacaagaatcccgagaactacgccgccatctctcccaacctgttcagggtgcagaagatgaccaacaaggattacttcttccggcaccacctggaaaccaccgtgcaggacaatgccaagctgaagggcatcacatggaagagattcggcctgaatggcatcgagaacatcctgaaagtgcgcgtgaaccacatcggccagattgtgtccattggcgagtacggatcc

SEQ ID NO: 195 - DNA, 4335 bp, Artificial Sequence
  OMNI nuclease sequence
ggtaccaagaagatcctgggcctcgacctgggcaccaattctattggctgggccgttgtgaacgaggccgagaacgagaatgagaagtccagcatcgtgaagctgggcgtcagagtgaaccctctgaccgtggacgagctgaccaacttcgagaagggcaagagcatcaccaccaacgccgatagaaccctgaagcggagcatgcggagaaacctgcagcggtacaagctgcggagagagaacctgattgagctgctgaaggccaaccacttcatcgacgacgataccgtgctgagcgagaacggcaacagaaccaccttcgagacatacagactgagagccaaggccgccaccacagagatttctctggccgagtttgcccgggtgctgctgcagatcaacaagaagagaggctacaagagcagcagaaaggccaagagcaccgaggaaggacagctgatcgacggcatggaaatcgccaagcggctgtacgacgagaatctgacaccaggccagctgtccctggaactgctgaagtgcggcaagaagtacctgcctgacttctacagaagcgacctgcaggccgagttcgacaaagtgtgggacgtgcagaagcagttctaccccgagctgctcaccgatgagctgaaagagaacatccggggcaagatcgccagctccaccaagaccatctgcgagaagtgcttttgcgtggaaggcatcaagaccacacggacccaagagtacaagatcaagtactacgagctgcgcgtgaagtccatcagccagaagatcagcctggacgagacagccctggtgctgtccgagatcaacggccagattaacaacgccagcggctacctgggcgacatcagcgatagaagcaaagagctgtacttcaaccaccagaccgtgggccagtaccagatgagccagctggacaagaaccccaactacagcctgaagaaccaggtgttctataggcaggactacctgaacgagttcgagacaatctgggagacacaggccaagtttcacaaagaactgacccctgagctgaagaaagagatccggaacgtcgtcatcttctaccagcggcctctgaagtcccagaagggcctgatcagcttctgcgagtttgagagccggcagatcgaggtggaagtggacggcaagaaaaagctgaaaaccgtgggctgcagagtgtgccctaagagcagccctctgttccaagagtttaagatctggcagaggctgaacgacgtggaactgaccggcatgatcgtgcccaatcagcagcaggatctgttcggctacagcaaggactacgcctacggcaagagaaggctgttccccgaagagaaggacatgctgttcgccgagctgaactacaaagagaagctgagcaaggccgaggctctgaagatgctgttccctaagcggaaggacgtggacatcaactttaaagagctggacggaaatcacacccaggccgaactgttcaaggcctacatctctatcgccgagagaagcggccacgatctgggcgatatgagcaagaaaaccgccaaagagatgctcgactgtatcgccgacatcttcagcaccatcggcatcgacaccaacatcctgaccttcaatcccgacctggaaggcaaagagttcgagcagcagcccatgtaccagctgtggcatctgctgtatagcttcgagggcgacaacagcaacctgggcaacgagaaactgatcgagaagctgttcgacaagttcggcttcgagagagagtacgccgccattctggccaccgtggtgtttaaagaggccggcgattacagcagcctgagcaccaaggccatcagaaagatcctgcctcacctgaaggacggcaacgattactctgtggcctgcgagtatgccggctacagacacagcaagcagagcctgaccaaagaagagattcagaacaaggtgctcaaggacaagctcgaactgctgcccagaaacagcctgagaaaccccgtggtggaaaagatcctcaaccagatgatcaacgtggtcaacagcatcattgacgagtacggcaagcccgacgagatcagaattgagctggcccgggaactgaagaagtccgctaaagagagagaggaactcttcaagtctatcaacgagacaacccgcatccacgaggaactcgtgaagaagctgcagaacgagtttggcctgagccacgtgtcccggaacgacatcatcagatacaagctgtacatggaactggccagcaacggctaccacacactgtacaccgacacctacattccccgggaaaagctgttctccaaagagtttgacatcgagcacatcattccgcaggccaagctgtttgacgactccttcagcaacaagaccctggaagccagacaggccaacctggacaagtccaacaccaccgccttcgacttcgtggccaccaaatacggcgacgacttcgccaacggcgagtataagacccggatcgacaagctgctggctgacaaagtgatcagcaagaccaagcacgataagctgctgatgaaggaagccgacattcccagcggcttcatcaacagggacctgcgggatagccagtatatcgccaagaaggccagagagatcctggaagaactggctagattcgtggtgcccaccaccggcagcatcaccgatagactcagagatgactggcagctggtggacgtgatgcaagagctgaattggaacaaatacgaccagctggggatgaccgagatcatcgagtgcagagatggccagcggatcagacggatcaaagagtggaccaagcggaacgaccacagacaccatgccatggatgccctgacaatcgccttcaccaagcggtccttcatccagtacctgaacaacctgaacgccagagtgcagaaaagcgtggacgactacatcgacctggacatggtggaactgtccgacctcaacaaagaaaagcgggccagcgctatgtacggcatcgagaagaaagaactgtatcgggacaaccacgggaagctgcggttcaaccctcctatgcctctgaatgagttcagagccgaggccaaacggcagctggaaaacaccctgatctccatcaaggccaaaaacaaggtggtcacccggaacatcaacgtgtccaagaaaaaaagcggcgtgaacaagaacgtgcagctgacacctagagggcagctgcacctggaaacaatctacggcagcagcaagcgctacgtcaccaaagaggaaaaagtcaacgcctccttcgacgccaccaagatccagatggtgtccagcaagagatacagagaggccctgctggctcggatcaatcagtttggcggagatgccaagaaagccttcaccggcaagaacgccctggataagaatcccatctggctgaacgcccagcacaccgacaaggtgcccgagaaagtgaagatcgtgggctttgaaaccatctacaccatccgcaaagagatcagccccgacctgagaatcgagaaggtggtggatgcccacatcagacagattctgcagagcagactggacgagttcggcggcgacgctaagaaggcctttagcaatctggacgaaaacccgatctggctcaacaaggataagtctatcgccatcaagagagtgaccatcaccggcatcagcaatggcgagcctctgcacgacaagcgggacaagaatggcaacctgatcctggatgagaacgacaaccctcagcctgtggacttcgtgaacaccggcaacaaccaccatgtggccatctacagaaagcccaagctcgacaaaaacaaccagcctatcctggacaacaacggcaatatgcagtacgaactcgacgagaagattgtgtccttctacgaggccaccagccgggctatgcagcatctgcctatcatcgacaagacctacaagcaagaggaaggatggcagttcctgttcaccatgaagcagaatgagtacttcgtgttccccagatacgacgccgacgggaacatgacattcaacccactggaacacgacgaggcctggtacaagaatcccgagaactacgccgagatctcccctaacctgttcagggtgcagagcatctccaaagtgatgtatggcaacaacgccgtgcgggactacatcttccggcatcatctggaaaccaccgtgaccagcaagctgaagggactgacctaccagcagtacaagagcctggtgtttgccgacaagatcgtgaaagtgcgagtgaaccacatcgggcagatcgtgtccatcggcgagtacggatcc

SEQ ID NO: 196 - DNA, 4191 bp, Artificial Sequence
  OMNI nuclease sequence
ggtaccagcaagatcctgggcatcgacctgggcacaaatagcatcggcctggccatcagagacaccgacaagggcgagacattcgtggaacaggtggacttcttcagcagcatcatcttcaagagcggcgtcggatctggacaggccggcgaattttcttacgccgccgagaggaccaagaagcggagcatcagaaggctgtaccagagccggaagtacagaatctggaccacactggccctgctgatcgagaatggctactgccctctgagcatcgaggacctggataagtggcggagatacgacaaagagaagggcctgaagcggcagtaccctatcgaggccattcagttcgagcagtggatcagactggacttcgatggcgacggcaagcccgactacatcaacccttatgagctgcgggccgagatcatgcagaagcagttcgacttcaacgaggaaatcaaccggtacaagctgggcagaatcctgtaccacatcacccagcggagaggcttcaagtccagcaagggcgaaaccctgaaagagctgagcgagaacgagatcaatgaggatctggatctgagcgtggccctgcagaagtccgaggaaaagaagtcccagaaactgaaggatttcatgaaggaacacaacatccccaccgtcggctgggccttttacgagctgaccaagagaggcatccggatcaaagagtccgagtaccaggccgtgcgcatccagtacaaagaggaaatccagaagatctttgagttccaagaaggcctggacaccaccagcgacttctacaagcacctgatgtccgagaagaaaggcgagggcaccatcttttacaagcggcccctgcggagccagaaaagcaaagtgggcacctgtacactggaaaccggcaagagcagatgccccatctctcaccccgagttcgaagagtacagagcctggtccttcatcaacaacatcaagtaccggaccagcaccaccgccgagtggaaaacactgcccctgaacctgaagcaagagctgttcaaggacaagttcctgcggaccaagagctacttcaagtttgaagagatcaagaactggctgagcagcaagctgtgcctgcagctcgagtacaccaacaagaaagagacaagcaccatcaactacaaggataagaccaacgtcgtgggctgccccatcagcgccagactgaagaatatcctgggcgaagattacaagcagtggaagttcaactctgacaaagagcggaccaatagaaagaccggcgaggtgcaccggatcacctacgactatctggatatctggcacatctgcttcagcttcgacgaggccgagttcgtggaagagttcgccaagtgcaccctgaagctggacgacaagcaggccaagaagctgtgtaccctgcacaacaatatccagcaagagtacgccagcctgagcctgaaggccatccggaatatcaacccattcctgcagaaaggcctgatctacaccgatgccgtgctgctggccaagctgcccgagatcttcaaagacaagtggaacgaggtcgagaacgacatcgtggccgccatcgacgacatcatcaaagagaacagatacgagaagggcatcctggacatcgtgaacgacctgatcgccaattacaagagcctggactacggcgagagattcgccgagcacaacaccgagtacatcctgcagagccaggattacaccgacatcgagagcaagctgaagggccactttggcgagagaacctggaatgccaagccttgcgaggaacaagaacagatcagaaaggacgtgcgcgagctgtatcagatcttcttcggcagctccagccggggctactttaagcagcctaaggtgtccgagagcctggccgagtacctgaagaagcagtacacctacctgaacgacgacgacctgaaaaagatctatcaccccagcatgatcgagttctaccccaaagtgaagcccacactgctggacgataacaaatacgtgaagctgctgggcagccctgtgatcggagccctgaaaaaccctatggccatgagaatcctgcacaccctgagaacccagatcaaccagctgatcaaagaaggcaagatcgacgagtacacgaagatcgtggtggaaaccgccagagaagtgaacaacacaaacaagcgctgggccatcgaggaataccagcgcaagcaagaggaagagaacaaagaggttgagaagatcatccggcagtactaccagaaggacaacatcagcgacgacgagattaagaaggccaaaatcctgctggaccagttcgacgtggaaaaggataacaagcaagaaaagaagcaggatacccagagcgacaagctgtccgacacctggtctaaagtgaagtccaacaacattaagcgctacaagctgtggctggaacagaattgctgctgcatgtacaccggcaaagtgatcagaatcagcgagctgttcgacaacgacaagtttgacatcgagcacacaatccctcggagcatctccttcgacgacagcctgtccaacctgaccatctgcgacagccacttcaaccggtccatcaagaagaatcagatccccactcagctggacaactacaatgagatcaagtctcggctggaactgtggaagcagaaagtcaagtctctgaaagagagggtcgagtactggaaagagcagagcaagatcagccagaccaaggaccgcaaggaccagtgcatcaagcagagactgctctggcagatggaactggactactgggagaagaagctggcctccttcaccatcaaagagttcatcgacggcttccggaacaatcagctgaacgacacccggatcatcaccaaatacgccttccactacctgaaaaccgtgttcgagcacgtgtccgtgcagagaggcgagatcaccagcaacttcagaaagatcgtcggcatccagaaagaggacgagaagaaggatcggagcaaccacagccaccatgccatcgatgccgccatcctgacactgattccctccgccaagcagcggaatagaatcctggaaaccttctaccagatgaaggaaagcaaagagactaacaacaaggacaaactggaaaagaccaccaaagagctggaaaaggccaagagagccgctctgattcctaacgccgtggccgctatcaaggaccacattgagcagaacatcttcgtgaaccacatcagcaaggatcagacactgacccctgccaagcggagaaagagaatccggggaaagatcgacaagaacaaacagtggattatcaccggcgactgcatccggggcagcctgcacaaggatagcttctacggctgcatcctgatcgacggcaaaaagtacttcgtgatcagacgggccctgaagtacaaggccaacgataaggacaagggcttcaagacctggaacgaactcgagaatgccattgtggacaaggccctgtacagacggctggtcaagcctttttgtcaagagggcgccgaggaacccagcatcgactttaagaccgtgatgctggaaaaaggcggcctgtacgacaacggcatcaaagtgcggcacatccggtgctataccagcgtgaagaaccctctgcagatcaaaaagcagacctacaagagcaagcagggctacaagaactactactacgccgaagtgggcgatctctacaccatgtgcaaatacgagaacaagaaaaccggggagatcgtgtaccagccttacaacctgttcgaggtggccgcaaaccacaagatcacccacgagtttatcccttctaagtacgacgacaaggtgctgacacagcagctcgtgaagggcgacatgctgctcatctataaggataaccccaacgagctgtttgagatggacaacgtgcagctgagcaagcggctgtacgtgatcgatggcttcgagagaaagtcctgcctgaccaagctgatcaggtcctctaacgcccagcaggacaaagaactcggcaaaggcgagagcatcaaggacttcaacaacctgcctcagaagatccgccagtccatcaacaagctgcactacctgctgcggggcatcgatttcaagatcatcaacggcagaatcgagttcctgaacaagaccaagtactacgacggatcc

SEQ ID NO: 197 - DNA, 4194 bp, Artificial Sequence
  OMNI nuclease sequence
ggtaccagcaagatcctgggcatcgacctgggcacaaatagcatcggcctggccatcagagacaccgacaagggcgagacattcgtggaacagctggacttcttcagcagcatcatcttcaagagcggcgtcggctctggccctagcggagaattttcttacgccgccgagcggaccaacagcagatccatcagaaggctgtaccagagccggaagtaccggatctggacaacactggccctgctgatcgagcacgagtactgtcctctgagcatggaagatctggataagtggcggcggtacaacaaagagaagggcctgaagagacagtaccccatcgacgccatcaagttcgagcagtgggtccgactggatttcgatggcgacggcaagcccgactacacaaacccttatgagctgcgggccgagatcatgcagaagcagttcgacttcaacagcgagatcgaccggtacaagctgggcagaatcctgtaccacattgcccagcggagaggcttcaagtccagcaagggcgaaaccctgaaagagctgagcgagaaagagatgaacgaggacctggatctgagcgacgccctgcagaagtccgaggaaaagaagtcccagaaactgaaggatttcatgaagacccacaacatccccaccgtcggctgggccttttacgagctgacaaagcagggcatcagaatcaaagagtccgagtaccaggccgtgcgcatccagtacaaagaggaaatccagaaaatcttcgagttccagaaggggctcgacatcaactccgccttctacaagcacatcatgtccgagaagaagaacgagggcaccatcttttacaagcggcccctgcggagccagaaaggcaaagtgggaacctgtacactggaacagggcaagacacggtgccccatctctcaccctgagttcgaagagtacagagcctggtccttcatcaacaacatcaagtacagaaccagcaccaccgccgagtggcagacactgtctctgaagctgaaagaggaactgttcaaggacaagttcctgcggaccaagagctacttcaagtttgaagagatcaagaactggctgagcgccaagctgagcatccagctcgagtgcaacgacaagaaagagaacagcaccatcaactacaaggataagaccaacgtgatcggctgccccatcagcgccagactgaagaacatcctgggcgaagattacaagcagtggaagttcaagtccgacaaagagcgcaccaacctgaaaaccggcgaggtgcaccggatcatctacaactacatcgacatctggcacatctgcttcagcttcgacgaggccgagttcgtggaagagttcgccaaggacagcctgaagttcgacaacaagcaggccaagcagctgtgcaccctgcacaacaatatccagcaggactacgccagcctgagcctgaaggccatccggaatatcaacccattcctgcagaaaggcctgatctacaccgatgccgtgctgctggccaagctgcccgagatcttcaaagacaagtggtgcgagattgaggacgacgtgatcgccgacatcgacaatatcatcaaagagaaccgctaccagaaagaaatcagcgacatcgtgaacgacctgattgccgactacaagagcctggactacaacgagagattcgccgagcacaacaccgagtacatcctccagaaccaggactacacagacatcgagaacaagctgaagtcccacttcggcgagaaaacctggatcaccaagccttgcgaggaacaagagcagatccggaaggacgtgtgcgagctgtatcagatcttcttcggcaacagcacccgggattacttcaagcagcccaagatcagcgagagcctggccgagtacctgaaaaacaagtacacctacctgaacgacgacgacctgaagaaaatctatcaccccagcatgatcgagatctacccgatcgccaaaaaagagatcatcgacggcgacaagagcgtgcggagactgggatctcctgtgatcggagccctgaagaaccctatggccatgagaatcctgcacaccctgagaagccagatcaacaaactgatcgacgagagcaagatcgatgagcacaccaggatcatcgtggaaaccgccagagaagtgaacgacgccaacaagagatgggccatcgaggaataccagcgcaagcaagaggaagagaacaaagaaatcgagaagatcatcagcaagtacttcgaggaaggcaacatctccgacaacgacattcggaaggccaaggtgctgctcgaccagttcgacatcgaaaagaacgacaaacaggccaaagagaaaaagacgaagtccgacgacaagctgtccgacacctggtccaaagtgaagtccgataacatcaagaagtacaagctctggctcgagcagaattgctgctgcatgtacaccggcaaagtgatcaccatcagcgagctgtttgacggggacaagtttgacatcgagcacacaatccccagaagcgtgtccttcgacgacagcctgtccaacctgacaatctgcgagagccacttcaaccggtctatcaagaagaatcagctgcccactcagctggacaactacaatgagatcgaggccagactggaaacctggcggaagaaggtgctgtccctgaaggacagagtgaacttctggaaagagcagagcaagcgggcccagaccaaggatagaaaggaccagtgcatccggcagcggctgctgtggcagatggaactggactactggaagaagaagctggcctcctttaccatcaccgagttcatcgacagcttccggaacaaccagctgaacgacacacggatcatcaccaaatacgccttccactacctcaagaccgtgttcgagcacgtgtccgtgcagagaggcgagatcaccagcaacttccggaaaatcgtgggcatccagaaagaggatgagaagaaggatcggagcaaccacagccaccatgccatcgatgccgccatcctgacactgatcccttccgccaagcagagaaatcgcatcctggaaacattctaccagatgaaggaaagcaaagagagcaacaacaaggacaaactggaaaagaccaccaaagagctggaaaaggccaagagagccgctctgatccctgatgccattgccgccattaaggaccacattgagcagaacatcttcgtgaaccacatctccaaggaccagacactgacccctgccaagcggcggaagagaatcagaggaaagatcgacaagaacaaacagtggatcattaccggcgactgcatccggggaagcctgcacaaggatagcttctacggctgcatcctgattgacggcaagaaatacttcgtgatcagacgggccctgaagtataaggccaacgataaggacaagggcttcaagacctggaacgaactcgagaacgccatcgtggacaaggccctgtatagacggctggtcaagcccttttatcaagagggcgccgaggaacccagcatcgactttaagaccgtgatgctggaaaaaggcggcctgtacgacaacggcatcaaagtgcggcacatccggtgctataccagcgtgaagaatcccctgcagattaagaagcagacctacaagtccaagcagggctacaagaactactactacgctgaagtgggcgacctctacaccatgtgcaaatacgagaacaaaaagaccggcgagatcgcctaccagccttacaacctgtttgagatcgccgccaaccacaagatcacccacgagtttatcccttctaagtacgacgataaggtgctgacccagcagctgatcaagggcgacatgctgctcatctataagaacaaccccaacgagctgttcgagatggacaacatccagctgtccaagcacctgtacgtgatcgacggcttcgagagaaacagctgcctgatcaagctgatctgcaacagcaacgctcagcaggacaaagaactcggcaaaggcgagagcatcaaggactttaacaacctgcctcagaagatccggcagaccatcaacaagctgcactacctgctgagaggcgtggacttcgagatcatcaatggccggatcgagttcagcaacaagaccaagtactacgacggatcc

SEQ ID NO: 198 - DNA, 4476 bp, Artificial Sequence
  OMNI nuclease sequence
ggtaccaagaacatcctgggcctcgacctgggcacaaattctatcggatgggccgtgatcagccacgacggcatgtgttactctggcatcaagtgcgccggcagcagaatcattcctatggatgccgccaccatgggcgacttcgataagggcgtgacaaagagcagcgccagcgagagaacacagcagagaggcatcagacggctgaacgagagaagcctgctgcggagagaaagactgcacagagtgctggacatcatgggctttctgcccgagcactacagccggaatctgaccagatacggcaagttcatcagcgagaaagtgaagctggcctggaccgacgagggcagatttctgttcgacgcctccttcaacgagatgctgcacgagttcagatcacagcaccccagcctgatggaaagcggcaagaagatcccctacgactggaccgtgtactacctgagaaagaaggccctgagctaccccatcaacaagttcgagctggcttggattctgctcaacttcaaccagaagcggggctactaccagctgagaggcgaagaggatgacgagaaggccagcaacaagtgggaagagtacatgagcctgaaggtgctgagagtggaagatagcggcgagaaaaccggcaagtacacctggtacagagtgcacctggacaacggcatgatctacaacagaaagagcaacatccctctggactgggagggcaagaccagagactttatcgtgaccaccgagctgaacaacgacggcacccctaagaccgacaaagagggcaacttcaagcggagcttcagaagccccagcgagaacgattggaccctgatcaagaagaaaaccgaggccgacatcgagaagtcccagaaaaccgtgggcacctacatctacgagtccctgctgcagaaccccacacagaagatcagaggcaagctcgtcagagtggtggaacggaagttctacagaagcgagctgaagctgatcctggaaaagcagtgccggttcctgcctgaactgcaggatgctgctctgctgcaggcctgtctggaagaactgtaccctcacaaccggatgcaccgggacatcatctccaacaagggcttcaccagcctgttcatcgacgatatcatcttctaccagcggcctctgaagtccaagaagtccctgatcggcaactgcccctacgagtggcacagctacgtggacaagaccaccggcaagacaaagaccgtctacaacaagtgtatcgccaagtctcacccactgtaccaagagttcagactgtggcagttcctgagcaacctgcggatctacagcaagggcacatacgagcaggatgtgaccaccagactgctgcccgatcaagagagctacgccgctctgttcagctggctgaatgaccggacctctatcaagcagaaggacttcctgaactacagcggcttcaagctgaccaagaccgagcagaaaaactaccggtggaactacgtcgaggacaagacatacccctgcaacgagacacggggcgagatcctgaagagaatcctggactgcaacctgcctgagatcttcctgaccaaagagcgcgagctgagcctgtggcacattctgtacagcgttgaggacaaagaacagtacaagaaagccctcgagaagttcgccgagaagaacagcatcgacagcgccgattttgtggccgcctttgagaagatggccgctttcaagaaagagtacggcagctacagcgccaaggccgtgtctaaactgctgccactgatgcggagaggcagctcttggagcgagacagagatcgataagaacaccctggaacggatcaacaagctgatcgacggcgagtacgatgagcagctgtgcgaacaggcttatgaaggcgtggccggactgagcgacgtgtcacaatttcaaggactgcctgtgtggctggcctgctacatcgtgtacaatagacacagcgaggccaccgacgtgtccagatgggagtctcccgatgacatcgacaagtacctgagcgacttccggcagcacagcctgagaaaccctatcgtggaacaggtggtgctggaatgcctgagaaccgtgcgggacatttggagacaagtgggccacatcgacgagattcacgtggaactgggcagagagatgaagaaccccgccgacaagcggaagaaaatgaccgagagcattctggaaaacgagaaagccaacctgagagccaaggccatgctgatggaactgatgaaccccgagatgaaggtggaaggcgtgcggcctcattctcctggccagcaagagctgttccggatctacgaggaaaacgtgctgaacagcgagaaggtgcccgacgacatcacagagatcctggccaagttcaatcagaccgataacgccaagcggcccaccagcagcgaagtgaatagatacaggctgtggctggaccagaagtacagaagcccttacaccggcgagatgatcagcctgagcaagctgtttaccagcgcctacgagatcgagcacatcatccctcagagccggtacttcgacgatagcttcagcaacaaagtgatctgcgagtccgaagtgaacaagctcaagtccaacctgctgggccacgagtttatcaagaagcaccagggcgaaaaggtgcagctgagcatgggcaagacagtggaaatcctgagcgtggaagcctacgaaaagttcgtgaatgagcactactcctacaaccgcgtgaagaaagaaaagctcctgatggacgacatccccgagaagtttatcgagcggcagatgaacgacagccggtacatctctaagctggtcaaggccctgctgtccaacatcgtcagagaggaaggcgagaaggacgccaccagcaagaatgtgatcagctgtaccggcggcatcaccgacagactgaagaaggactggggcatcaacgacgtgtggaacggcatcatcctgcctagattcatccgcatgaacgagattgataagaccaatagctacaccgccatcaacaccagcggcaatatcatccccgacatgcccttcgagtaccagcggggctttagcaagaagcggatcgatcacagacaccacgccatggatgccatcgtgatcgcctgtgccagccggaacgtggtcaactacctgaacaatagcagcgccgccaaagagtccgaggccggcagaatggatctgcggaacaagctgtgcaacaagaactacaccgacgacaagggcaattacaagtggatcatccggaagccttgggagacattcacccaggacgtgaaagagacactgcaggacatcgtggtgtcctttaagcagaacctccggatcattaacaagagcagcaacaggaccctgcacttcgaggaagggaagaagaagctgcagaagcagaccaagggcgacaactgggccatcagaaagcctatgcacaaggacaccgtgtacggggaagtgaacctgcagcggacaaaagaggtgtccttcaaagaggctctgaagcccgactacgccattgtgaacagggacctgcgcaagaaagtgctgagtctgcaggcaagcggctacgacgtgaagcagatgatgaagtactttgagtccgagaaggatgtgtggcaggacgtggacttcaagaaaatcaaagtgcggtacttcaccaagacgaccaacgacagatacttcgccacacggaagcccatcgactccagcttcaacaagaagaagatcgaggaatccatcacggacaccggcatccagaaaatcatgctgcggcacctggaaaacatgggcggcaatccagagctggcctttagctctgacggcctggacgagatgaacaagaatatccgggctctgaacaatggccggttccaccagccagtgtacaaagttcggatctatgagaaggccgataagtacgccatcggagagaagggccagaaggccaagaaattcgttgaggccgccaagggcaccaatctgttcttcgccatctacgaaaacgaaaccgtggataagagcacaggggagatcctgcggaagcggtccttcacaacaatccccatgaacatcgtgatgaatcggctgaagcaggggctgagccctgtgcctgccaatgattgtggcaaggatgccaaatacgtgctgagccccaacgacctggtgtacgtgccaacaaaggccgaactggaacacggcgtggacatggccagcctggacaaggaccggatctataagatggtgtccgccgaccggtccaacagccacttcgtgaaagaaagcgtggcctctccaatcgtgaacaaggtggaatttggcagccacaacaagatgcagtgtgccgtgacaggcgaaatgatcaaagagatctgcatcccactgaaagtggaccggctgggcaacatcatcaagatgggaggatcc

SEQ ID NO: 199 - DNA, 4476 bp, Artificial Sequence
  OMNI nuclease sequence
ggtaccaagaacatcctgggcctcgacctgggcacaaattctatcggatgggccgtgatcagccacgacggcatgtgttactctggcatcaagtgcgccggcagcagaatcattcctatggatgccgccaccatgggcgacttcgataagggcgtgacaaagagcagcgccagcgagagaacacagcagagaggcatcagacggctgaacgagagaagcctgctgcggagagaaagactgcacagagtgctggacatcatgggctttctgcccgagcactacagccggaatctgaccagatacggcaagttcatcagcgagaaagtgaagctggcctggaccgacgagggcagatttctgttcgacgcctccttcaacgagatgctgcacgagttcagatcacagcaccccagcctgatggaaagcggcaagaagatcccctacgactggaccgtgtactacctgagaaagaaggccctgagctaccccatcaacaagttcgagctggcttggattctgctcaacttcaaccagaagcggggctactaccagctgagaggcgaagaggatgacgagaaggccagcaacaagcaagaggagtacatgagcctgaaggtgctgagagtggaagatagcggcgagaagtccggcaagtacacctggtacagagtgcacctggacaacggcatgatctacaacagaaagagcaacatccctctggactgggtcggaaaagagcgggacttcatcatcaccaccgagctgaacaacgacggcacccctaagaccgacaaagagggcaacttcaagcggagcttcagaagccccagcgagaacgattggaccctgatcaagaagaaaaccgaggccgacatcgagaagtctcagaaaaccgtgggcacctacatctacgagtccctgctgcagaaccccacacagaagatcagaggcaagctcgtcagagtggtggaacggaagttctacagaagcgagctgaagctgatcctggaaaagcagtgccggttcctgcctgaactgcaggatgctgctctgctgcaggcctgtctggaagaactgtaccctcacaaccggatgcaccgggacatcatctccaacaagggcttcaccagcctgttcatcgacgatatcatcttctaccagcggcctctgaagtccaagaagtccctgatcggcaactgcccctacgagtggcacagctacgtggacaagaccaccggcaagaccaagacagtgtacaacaagtgtatcgccaagtctcacccactgtaccaagagttcagactgtggcagttcctgagcaacctgcggatctacagcaagggcacatacgagcaggacgtgaccaccagactgctgcccgatcaagagagctacgccgctctgttcagctggctgaatgaccggacctctatccggcagaaggacttcctgaactacagcggcttcaagctgaccaagaccgagcagaaaaactaccggtggaactacgtcgaggacaagacatacccctgcaacgagacacggggcgagatcctgaagagaatcctggactgcaacctgcctgagatcttcctgaccaaagaacgcgagctgtccctgtggcacatcctgtacagcgttgaggacaaagaacagtacaagaaagccctcgagaagttcgccgagaagaacagcatcgacagcgccgatttcgtggccgcctttgagaaaaccaccgccttcaagaaggactacggcagctacagcgccaaggccatttctaggctgctgcccctgatgagaagaggccggttttggagcgaggaaaagatcgataagaacaccctggaacggatcgagaagctgattaacggcgagtacgacgagcagctgtgcgagcaggcttatgaaggcgtggcaggactgagcgacgtgtcacagtttcagggactgcctgtgtggctggcctgctacatcgtgtacaatagacacagcgaggccaccgacgtgtccagatgggagtctcccgatgacatcgacaagtacctgagcgacttccggcagcacagcctgagaaaccctatcgtggaacaggtggtgctggaatgcctgagaaccgtgcgggacatttggagacaagtgggccacatcgacgagattcacgtggaactgggctgcgagatgaagaaccccgccgacaagcggaagaaaatgaccgagagcattctggaaaacgagaaagccaacctgagagccaaagccatgctgatggaactgatgaaccctgagatgaaggtggaaggcgtgcggcctcattctcctggccagcaagagctgttccggatctacgaggaaaacgtgctgaacagcgagaaggtgcccgacgacatcacagagatcctggccaagttcaatcagaccgataacgccaagcggcccaccagcagcgaagtgaatagatacaggctgtggctggaccagaagtacagaagcccttacaccggcgagatgatcagcctgagcaagctgtttaccagcgcctacgagatcgagcacatcatccctcagagccggtacttcgacgatagcttcagcaacaaagtgatctgcgagtccgaagtgaacaagctcaagtccaacctgctgggccacgagtttatcaagaagcaccagggcgaaaaggtgcagctgagcatgggcaagaccgtggaaatcctgagcgtggaagcctacgaaaagttcgtgaatgagcactactcctacaaccgcgtgaagaaagaaaagctgctcatggacgacatccccgagaagtttatcgagcggcagatgaacgacagccggtacatctctaagctggtcaaggccctgctgtccaacatcgtcagagaggaaggcgagaaggacgccaccagcaagaatgtgatcagctgtaccggcggcatcaccgacagactgaagaaggattggggcatcaacgacgtgtggaacggcatcatcctgcctagattcatccgcatgaacgagattgataagaccaatagctacaccgccatcaacaccagcggcaatatcatccccgacatgcccttcgagtaccagcggggctttagcaagaagcggatcgatcacagacaccacgccatggatgccatcgtgatcgcctgtgccagccggaacgtggtcaactacctgaacaatagcagcgccgccaaagagtccgaggccggcagaatggatctgcggaacaagctgtgcaacaagaactacaccgacgacaagggcaattacaagtggatcatccggaagccttgggagacattcacccaggacgtcaaagagacactgcaggacatcgtggtgtccttcaagcagaacctccggatcattaacaagagcagcaacaggaccctgcacttcgaggaagggaagaagaagctgcagaagcagaccaagggcgacaactgggccatcagaaagcctatgcacaaggacaccgtgtacggggaagtgaacctgcagaggaccaaagaggtgtcctttaaagaggctctgaagcccgactacgccattgtgaacagggacctgcgcaagaaagtgctgagtctgcaggcaagcggctacgacgtgaagcaaatgatgaagtacttcgagtccgagaaggatgtgtggcaggatgtggacttcaagaaaatcaaagtgcggtacttcaccaagacgaccaacgacagatacttcgccacacggaagcccatcgactccagcttcaacaagaagaagatcgaggaatccatcacggacaccggcatccagaaaatcatgctgcggcacctggaaaacatgggcggcaatcctgatctggcctttagctccgatggcctggatgagatgaacaagaatattcgggctctcaacaacggccggttccaccagccagtctacaaagttcggatctatgagaaggccgataagtacgccatcggcgaaaaaggacaaaaggccaagaaattcgtcgaggccgccaagggcaccaatctgttcttcgccatctacgaaaacgaaaccgtggataagagcacaggggagatcctgcggaagcggtccttcacaacaatccccatgaacatcgtgatgaatcggctgaagcaggggctgagccctgtgcctgccaatgattgtggcaaggatgccaaatacgtgctgagccccaacgacctggtgtacgtgccaacaaaggccgaactggaacacggcgtggacatggccagcctggacaaggaccggatctataagatggtgtccgccgaccggtccaacagccacttcgtgaaagaaagcgtggcctctccaatcgtgaacaaggtggaatttggcagccacaacaagatgcagtgtgccgtgacaggcgaaatgatcaaagagatctgcatcccactgaaagtggaccggctgggcaacatcatcaagatgggaggatcc

SEQ ID NO: 200 - DNA, 4476 bp, Artificial Sequence
  OMNI nuclease sequence
ggtaccaagaacatcctgggcctcgacctgggcacaaattctatcggatgggccgtgatcagccacgacggcatgtgttactctggcatcaagtgcgccggcagcagaatcattcctatggatgccgccaccatgggcgacttcgataagggcgtgacaaagagcagcgccagcgagagaacacagcagagaggcatcagacggctgaacgagagaagcctgctgcggagagaaagactgcacagagtgctggacatcatgggctttctgcccgagcactacagccggaatctgaccagatacggcaagttcatcagcgagaaagtgaagctggcctggaccgacgagggcagatttctgttcgacgcctccttcaacgagatgctgcacgagttcagatcacagcaccccagcctgatggaaagcggcaagaagatcccctacgactggaccgtgtactacctgagaaagaaggccctgagctaccccatcaacaagttcgagctggcttggattctgctcaacttcaaccagaagcggggctactaccagctgagaggcgaagaggatgacgagaaggccagcaacaagcaagaggagtacatgagcctgaaggtgctgagagtggaagatagcggcgagaagtccggcaagtacacctggtacagagtgcacctggacaacggcatgatctacaacagaaagagcaacatccctctggactgggtcggaaaagagcgggacttcatcatcaccaccgagctgaacaacgacggcacccctaagaccgacaaagagggcaacttcaagcggagcttcagaagccccagcgagaacgattggaccctgatcaagaagaaaaccgaggccgacatcgagaagtctcagaaaaccgtgggcacctacatctacgagtccctgctgcagaaccccacacagaagatcagaggcaagctcgtcagagtggtggaacggaagttctacagaagcgagctgaagctgatcctggaaaagcagtgccggttcctgcctgaactgcaggatgctgctctgctgcaggcctgtctggaagaactgtaccctcacaaccggatgcaccgggacatcatctccaacaagggcttcaccagcctgttcatcgacgatatcatcttctaccagcggcctctgaagtccaagaagtccctgatcggcaactgcccctacgagtggcacagctacgtggacaagaccaccggcaagaccaagacagtgtacaacaagtgtatcgccaagtctcacccactgtaccaagagttcagactgtggcagttcctgagcaacctgcggatctacagcaagggcacatacgagcaggacgtgaccaccagactgctgcccgatcaagagagctacgccgctctgttcagctggctgaatgaccggacctctatccggcagaaggacttcctgaactacagcggcttcaagctgaccaagaccgagcagaaaaactaccggtggaactacgtcgaggacaagacatacccctgcaacgagacacacggcgagatcctgaagagaatcctggactgcaacctgcctgagatcttcctgaccaaagaacgcgagctgtccctgtggcacatcctgtacagcgttgaggacaaagaacagtacaagaaagccctcgagaagttcgccgagaagaacagcatcgacagcgccgattttgtggccgcctttgagaaagccaccgccttcaagaaggactacggcagctatagcgccaaggccatctctaggctgctgcccctgatgagaagaggccggttttggagcgaggaaaagatcgataagaacaccctggaacggatcgagaagctgattaacggcgagtacgacgagcagctgtgcgagcaggcttatgaaggcgtggcaggactgagcgacgtgtcacagtttcagggactgcctgtgtggctggcctgctacatcgtgtacaatagacacagcgaggccaccgacgtgtccagatgggagtctcccgatgacatcgacaagtacctgagcgacttccggcagcacagcctgagaaaccctatcgtggaacaggtggtgctggaatgcctgagaaccgtgcgggacatttggagacaagtgggccacatcgacgagattcacgtggaactgggcagagagatgaagaaccccgccgacaagcggaagaaaatgaccgagagcattctggaaaacgaaaaggccaacctgagagccaaagccatgctgatggaactgatgaaccccgagatgaaggtggaaggcgtgcggcctcattctcctggccagcaagagctgttccggatctacgaggaaaacgtgctgaacagcgagaaggtgcccgacgacatcacagagatcctggccaagttcaatcagaccgataacgccaagcggcccaccagcagcgaagtgaatagatacaggctgtggctggaccagaagtacagaagcccttataccggcgagatgatcagcctgagcaagctgtttaccagcgcctacgagatcgagcacatcatccctcagagccggtacttcgacgatagcttcagcaacaaagtgatctgcgagtccgaagtgaacaagctcaagtccaacctgctgggccacgagtttatcaagaagcaccagggcgaaaaggtgcagctgagcatgggcaagaccgtggaaatcctgagcgtggaagcctacgaaaagttcgtgaatgagcactactcctacaaccgcgtgaagaaagaaaagctgctcatggacgacatccccgagaagtttatcgagcggcagatgaacgacagccggtacatctctaagctggtcaaggccctgctgtccaacatcgtcagagaggaaggcgagaaggacgccaccagcaagaatgtgatcagctgtaccggcggcatcaccgacagactgaagaaggattggggcatcaacgacgtgtggaacggcatcatcctgcctagattcatccgcatgaacgagattgataagaccaacagctacaccgccatcaacaccagcggcaatatcatccccgacatgcccttcgagtaccagcggggctttagcaagaagcggatcgatcacagacaccacgccatggatgccatcgtgatcgcctgtgccagccggaacgtggtcaactacctgaacaatagcagcgccgccaaagagagcgaggccggcagaatcgatctgcggaacaagctgtgcaacaagaactacaccgacgacaagggcaattacaagtggatcatccggaagccttgggagacattcacccaggacgtcaaagagacactgcaggacatcgtggtgtccttcaagcagaacctgagaatcatcaaccggaccagcaacagaaccctgcacatcgaggccgataagaagaagctgcagagacagaccaagggcgacaactgggccatcagaaagcctatgcacaaggacaccgtgttcggagaagtgaacctgcagcgcgtgaaagaggtgtcctttaaagaggtgctgaagcccgagtacagcatcgtgaacagggacctgcgcaagaaagtgctgagtctgcaggcaagcggctacgacgtgaagcaaatgatgaagtacttcgagtccgagaaggatgtgtggcaggatgccgacttcaagaaaatcaaagtgcggtacttcaccaagacgaccaacgacagatacttcgccacacggaagcccatcgactccagcttcaacaagaagaagatcgaggaatccatcacggacaccggcatccagaaaatcatgctgcggcacctggaaaacatggacggcaaccctgatctggcctttagctccgatggcctggatgagatgaacaagaatattcgggctctcaacaacggccggttccaccagccagtctacaaagttcggatctatgagaaggccgacaaatacgccattggagagaagggccagaaggccaagaaattcgttgaggccgccaagggcaccaatctgttcttcgccatctacgaaaacgagacagtggataagagcaccggggagatcctgcggaagcggtccttcacaacaatccccatgaacatcgtgatgaatcggctgaagcaggggctgagccctgtgcctgccaatgattgcggcaaggatgccaaatacgtgctgagccccaacgacctggtgtacgtgcccacaaaggatgagctggaaagaggcgtggacggcaccacactggacaaggacagaatctacaagatggtgtcctccaacaactaccagtgcttcttcgtgaagaactccgtggcctctcctatcgtcaacaagatggaattttccagccagaacaaaatggaacgggccgtgacaggcgaaatgatcaaagagatctgcatcccactgaaagtggaccggctgggcaacatcatcaagatgggaggatcc

SEQ ID NO: 201 - DNA, 4476 bp, Artificial Sequence
  OMNI nuclease sequence
ggtaccaagaacatcctgggcctcgacctgggcacaaattctatcggatgggccgtgatcagccacgacggcatgtgttactctggcatcaagtgcgccggcagcagaatcattcctatggatgccgccaccatgggcgacttcgataagggcgtgacaaagagcagcgccagcgagagaacacagcagagaggcatcagacggctgaacgagagaagcctgctgcggagagaaagactgcacagagtgctggacatcatgggctttctgcccgagcactacagccggaatctgaccagatacggcaagttcatcagcgagaaagtgaagctggcctggaccgacgagggcagatttctgttcgacgcctccttcaacgagatgctgcacgagttcagatcacagcaccccagcctgatggaaagcggcaagaagatcccctacgactggaccgtgtactacctgagaaagaaggccctgagctaccccatcaacaagttcgagctggcttggattctgctcaacttcaaccagaagcggggctactaccagctgagaggcgaagaggatgacgagaaggccagcaacaagcaagaggagtacatgagcctgaaggtgctgagagtggaagatagcggcgagaaaaccggcaagtacacctggtacagagtgcacctggacaacggcatgatctacaacagaaagagcaacatccctctggactgggtcggaaaagagcgggacttcatcatcaccaccgagctgaacaacgacggcacccctaagaccgacaaagagggcaacttcaagcggagcttcagaagccccagcgagaacgattggaccctgatcaagaagaaaaccgaggccgacatcgagaagtcccagaaaaccgtgggcacctacatctacgagtccctgctgcagaaccccacacagaagatcagaggcaagctcgtcagagtggtggaacggaagttctacagaagcgagctgaagctgatcctggaaaagcagtgccggttcctgcctgaactgcaggatgctgctctgctgcaggcctgtctggaagaactgtaccctcacaaccggatgcaccgggacatcatctccaacaagggcttcaccagcctgttcatcgacgatatcatcttctaccagcggcctctgaagtccaagaagtccctgatcggcaactgcccctacgagtggcacagctacgtggacaagaccaccggcaagaccaagacagtgtacaacaagtgtatcgccaagtctcacccactgtaccaagagttcagactgtggcagttcctgagcaacctgcggatctacagcaagggcacatacgagcaggacgtgaccaccagactgctgcccgatcaagagagctacgccgctctgttcagctggctgaatgaccggacctctatccggcagaaggacttcctgaactacagcggcttcaagctgaccaagaccgagcagaaaaactaccggtggaactacgtcgaggacaagacatacccctgcaacgagacaagaggcgagttcctgaagagaatcctggactgcaacctgcctgagatcttcctgaccaaagaacgcgagctgtccctgtggcacatcctgtacagcgttgaggacaaagaacagtacaagaaagccctcgagaagttcgccgagaagaacagcatcgacagcgccgattttgtggccgcctttgagaaagccaccgccttcaagaaggactacggcagctatagcgccaaggccatctctaggctgctgcccctgatgagaagaggccggttttggagcgaggaaaagatcgataagaacaccctggaacggatcgagaagctgattaacggcgagtacgacgagcagctgtgcgagcaggcttatgaaggcgtggcaggactgagcgacgtgttccagtttcaaggactgcctgtgtggctggcctgctacatcgtgtacaatagacacagcgaggccaccgacgtgtccagatgggagtctcccgatgacatcgacaagtacctgagcgacttccggcagcacagcctgagaaaccctatcgtggaacaggtggtgctggaatgcctgagaaccgtgcgggacatttggagacaagtgggccacatcgacgagattcacgtggaactgggcagagagatgaagaaccccgccgacaagcggaagaaaatgaccgagagcattctggaaaacgaaaaggccaacctgagagccaaagccatgctgatggaactgatcaaccccgagatgaaggtggaaggcgtgcggcctcattctcctggccagcaagagctgttccggatctacgaggaaaacgtgctgaacagcgagaaggtgcccgacgacatcacagagatcctggccaagttcaatcagaccgataacgccaagcggcccaccagcagcgaagtgaatagatacaggctgtggctggaccagaagtacagaagcccttacaccggcgagatgatcagcctgagcaagctgtttaccagcgcctacgagatcgagcacatcatccctcagagccggtacttcgacgatagcttcagcaacaaagtgatctgcgagtccgaagtgaacaagctcaagtccaacctgctgggccacgagtttatcaagaagcaccagggcgaaaaggtgcagctgagcatgggcaagaccgtggaaatcctgagcgtggaagcctacgaaaagttcgtgaatgagcactactcctacaaccgcgtgaagaaagaaaagctgctcatggacgacatccccgagaagtttatcgagcggcagatgaacgacagccggtacatctctaagctggtcaaggccctgctgtccaacatcgtcagagaggaaggcgagaaggacgccaccagcaagaatgtgatcagctgtaccggcggcatcaccgacagactgaagaaggattggggcatcaacgacgtgtggaacggcatcatcctgcctcggttcatcagaatgaacgagattgataagaccaacagctacaccgccatcaacaccagcggcaatatcatccccgacatgcccttcgagtaccagcggggctttagcaagaagcggatcgatcacagacaccacgccatggatgccatcgtgatcgcctgtgccagccggaacgtggtcaactacctgaacaatagcagcgccgccaaagagtccgaggccggcagaatggatctgcggaacaagctgtgcaacaagaactacaccgacgacaagggcaattacaagtggatcatccggaagccttgggagacattcacccaggacgtcaaagagacactgcaggacatcgtggtgtccttcaagcagaacctccggatcattaacaagagcagcaacaggaccctgcacttcgaggaagggaagaagaagctgcagaagcagaccaagggcgacaactgggccatcagaaagcctatgcacaaggacaccgtgtacggggaagtgaacctgcagaggaccaaagaggtgtcctttaaagaggctctgaagcccgactacgccattgtgaacagggacctgcgcaagaaagtgctgagtctgcaggcaagcggctacgacgtgaagcaaatgatgaagtacttcgagtccgagaaggatgtgtggcaggatgtggacttcaagaaaatcaaagtgcggtacttcaccaagacgaccaacgacagatacttcgccacacggaagcccatcgactccagcttcaacaagaagaagatcgaggaatccatcacggacaccggcatccagaaaatcatgctgcggcacctggaaaacatgggcggcaatcctgaactggcctttagctccgatggcctggatgagatgaacaagaatattcgggctctcaacaacggccggttccaccagccagtctacaaagttcggatctatgagaaggccgataagtacgccatcggcgaaaaaggccagaaggccaagaaattcgttgaggccgccaagggcaccaatctgttcttcgccatctacgaaaacgagacagtggataagagcaccggggagatcctgcggaagcggtccttcacaacaatccccatgaacatcgtgatgaatcggctgaagcaggggctgagccctgtgcctgccaatgattgtggcaaggatgccaaatacgtgctgagccccaacgacctggtgtacgtgccaacaaaagccgagctggaacatggcgttgacatggccagcctggacaaggaccgcatctacaagatggtgtccgccgacagatccaacagccacttcgtgaaagaaagcgtggcctctccaatcgtgaacaaggtggaatttggcagccacaacaagatgcagtgtgccgtgacaggcgaaatgatcaaagagatctgcatcccactgaaagtggaccggctgggcaacatcatcaagatgggaggatcc

SEQ ID NO: 202 - DNA, 4476 bp, Artificial Sequence
  OMNI nuclease sequence
ggtaccaagaacatcctgggcctcgacctgggcacaaattctatcggatgggccgtgatcagccacgacggcatgtgttactctggcatcaagtgcgccggcagcagaatcattcctatggatgccgccaccatgggcgacttcgataagggcgtgacaaagagcagcgccagcgagagaacacagcagagaggcatcagacggctgaacgagagaagcctgctgcggagagaaagactgcacagagtgctggacatcatgggctttctgcccgagcactacagccggaatctgaccagatacggcaagttcatcagcgagaaagtgaagctggcctggaccgacgagggcagatttctgttcgacgcctccttcaacgagatgctgcacgagttcagatcacagcaccccagcctgatggaaagcggcaagaagatcccctacgactggaccgtgtactacctgagaaagaaggccctgagctaccccatcaacaagttcgagctggcttggattctgctcaacttcaaccagaagcggggctactaccagctgagaggcgaagaggatgacgagaaggccagcaacaagcaagaggagtacatgagcctgaaggtgctgagagtggaagatagcggcgagaagtccggcaagtacacctggtacagagtgcacctggacaacggcatgatctacaacagaaagagcaacatccctctggactgggtcggaaaagagcgggacttcatcatcaccaccgagctgaacaacgacggcacccctaagaccgacaaggacggcaacgtgaagagaagcttcagaagccccagcgagaacgattggaccctgatcaagaagaaaaccgagaacgacatcgagaagtctagaaagaccgtgggcacctacatctacgacagctttctccagaatcctacacagaagatccggggcaagctcgtcagagtggtggaacggaagttctacagaagcgagctgaagctgatcctggaaaagcagtgccggttcctgcctgaactgcaggatgctgctctgctgcaggcctgtctggaagaactgtaccctcacaaccggatgcaccgggacatcatctccaacaagggcttcaccggcctgttcatcgacgatatcatcttctaccagcggcctctgaagtccaagaagtccctgatcggcaactgcccctacgagtggcacagctacgtggacaagaccaccggcaagaccaagacagtgtacaacaagtgtatcgccaagtctcacccactgtaccaagagttcagactgtggcagttcctgagcaacctgcggatctacagcaagggcacatacgagcaggacgtgaccaccagactgctgcccgatcaagagagctacgccgctctgttcagctggctgaatgaccggacctctatccggcagaaggacttcctgaactacagcggcttcaagctgaccaagaccgagcagaaaaactaccggtggaactacgtcgaggacaagacatacccctgcaacgagacacggggcgagatcctgaagagaatcctggactgcaacctgcctgagatcttcctgaccaaagaacgcgagctgtccctgtggcacatcctgtacagcgttgaggacaaagaacagtacaagaaagccctcgagaagttcgccgagaagaacagcatcgacagcgccgattttgtggccgcctttgagaaagccaccgccttcaagaaggactacggcagctatagcgccaaggccatctctaggctgctgcccctgatgagaagaggccggttttggagcgaggaaaagatcgataagaacaccctggaacggatcgagaagctgattaacggcgagtacgacgagcagctgtgcgagcaggcttatgaaggcgtggcaggactgagcgacgtgtcacagtttcagggactgcctgtgtggctggcctgctacatcgtgtacaatagacacagcgaggccaccgacgtgtccagatgggagtctcccgatgacatcgacaagtacctgagcgacttccggcagcacagcctgagaaaccctatcgtggaacaggtggtgctggaatgcctgagaaccgtgcgggacatttggagacaagtgggccacatcgacgagattcacgtggaactgggcagagagatgaagaaccccgccgacaagcggaagaaaatgaccgagagcattctggaaaacgaaaaggccaacctgagagccaaagccatgctgatggaactgatcaaccccgagatgaaggtggaaggcgtgcggcctcattctcctggccagcaagagctgttccggatctacgaggaaaacgtgctgaacagcgagaaggtgcccgacgacatcacagagatcctggccaagttcaatcagaccgataacgccaagcggcccaccagcagcgaagtgaatagatacaggctgtggctggaccagaagtacagaagcccttacaccggcgagatgatcagcctgagcaagctgtttaccagcgcctacgagatcgagcacatcatccctcagagccggtacttcgacgatagcttcagcaacaaagtgatctgcgagtccgaagtgaacaagctcaagtccaacctgctgggccacgagtttatcaagaagcaccagggcgaaaaggtgcagctgagcatgggcaaaaccgtggaaatcctgagcgtggaagcctacgaaaagttcgtgaatgagcactactcctacaaccgcgtgaagaaagaaaagctgctcatggacgacatccccgagaagtttatcgagcggcagatgaacgacagccggtacatctctaagctggtcaaggccctgctgtccaacatcgtcagagaggaaggcgagaaggacgccaccagcaagaatgtgatcagctgtaccggcggcatcaccgacagactgaagaaggattggggcatcaacgacgtgtggaacggcatcatcctgcctcggttcatcagaatgaacgagattgataagaccaacagctacaccgccatcaacaccagcggcaatatcatccccgacatgcccttcgagtaccagcggggctttagcaagaagcggatcgatcacagacaccacgccatggatgccatcgtgatcgcctgtgccagccggaacgtggtcaactacctgaacaatagcagcgccgccaaagagtccgaggccggcagaatggatctgcggaacaagctgtgcaacaagaactacaccgacgacaagggcaactacaagtggatcatccggaagccttgggagacattcacccaggacgtcaaagagacactgcaggacatcgtggtgtccttcaagcagaacctccggatcattaacaagagcagcaacaggaccctgcacttcgaggaagggaagaagaaactgcagaagcagaccaagggcgacaactgggccatcagaaagcctatgcacaaggacaccgtgtacggggaagtgaacctgcagaggaccaaagaggtgtcctttaaagaggctctgaagcccgactacgccattgtgaacagggacctgcgcaagaaagtgctgagtctgcaggcaagcggctacgacgtgaagcaaatgatgaagtacttcgagtccgagaaggatgtgtggcaggatgtggacttcaagaaaatcaaagtgcggtacttcaccaagacgaccaacgacagatacttcgccacacggaagcccatcgactccagcttcaacaagaagaagatcgaggaatccatcacggacaccggcatccagaaaatcatgctgcggcacctggaaaacatgggcggcaatcctgaactggcctttagctccgatggcctggatgagatgaacaagaatattcgggctctcaacaacggccggttccaccagcctgtgtacaaagttcggatctatgagaaggccgataagtacgccatcggcgaaaaaggccagaaggccaagaaattcgttgaggccgccaagggcaccaatctgttcttcgccatctacgagaacgagacagtggataagagcaccggggagatcctgcggaagcggagctttacaacaatccccatgaacatcgtgatgaatcggctgaagcagggactgagccccgtgcctgccaatgattgtggcaaggatgccaaatacgtgctgagccccaacgacctggtgtacgtgccaacaaaggccgaactggaacacggcgtggacatggccagcctggacaaggaccggatctataagatggtgtccgccgaccggtccaacagccacttcgtgaaagaaagcgtggcctctccaatcgtgaacaaggtggaatttggcagccacaacaagatgcagtgtgccgtgacaggcgaaatgatcaaagagatctgcatcccactgaaagtggaccggctgggcaacatcatcaagatgggaggatcc

SEQ ID NO: 203 - DNA, 4497 bp, Artificial Sequence
  OMNI nuclease sequence
ggtaccaagaagatcctgggcctcgacctgggcaccaattctattggctgggccgtcgtgaacgccgacatcgagaatggcgagacaaagatcaagagcatcgagagcgccggcagcagaatcatccctatggatgccgagatcatgggcaagttcgagacaggcaatagcgtgtcccagaccgccgagagaacaaagtgtagaggcaccagacggctgctggaacggttcctgctgcggagagaaagactgaaccgggtgctgaacctgatgggcttcctgcctgagcactacagcgccaagctggacagatacggcaagttcatcgacgagagcgagcccaagctgccttggagcaaggatgagaacggcaagagcaagttcctgttccaagagtccttcctggaaatgtgcgacgagttcaagagagtgaacaccggcatcaagaacatccccagcgactggaccatctactacctgcggaagaaggccctgaccaagcctatcagcaagtttgagctggcctggattctgctcaacttcaaccagaagcggggctactaccagttcagagaggaagagatcgacaacaacaagaacaagaaagaagagtactacaagctgcaggtcctgcgcgtggaaaaggacaacgaggaaaagggcttcacctggtacaacatgcacctggaaaacggcatgatctacaagcggaagtccaagatgcccctggacaactgggagggcaagatcaaagagttcatcatcaccaccgagctgaacgacgacggcagcgagaagatcgataagtacggcgacgtgaagcggagcttcagagtgcccgaggaaaacgactggggcctgatgaaggtcaaaaccgagaaagagatcaacgacagcaaaaagaccgtgggctgcttcatctacgacgccctgctgcagaaccctcagcagaagatcatcggcggcctcgtcagagtggtggaacggaagtattacaaagaggaaatcctgcagatcctgaaggtgcagaaagagtttatccctgagctgaaggacaaggacctgctgatccagtgcatcgagtccctgtaccagagcaacgagatccggcggaacatcctgaaccagaaggacttcacctacctgttcgccgaggacatcctgttctaccagcggcctctgaaaacaaagaagtacctgatcagcaactgcccctacgagacacggaactacaaggataaggacgccgacaagatcaccgagcctctgaagtgcgtggtcaagtctcaccctctgtttcaagagttccggctgtggcagttcatcagcaacctgaagatctacaaaaagggcgtgatcgaccaggactgcaccaaccagtttctgaaaaccgaggacgacatcgtcagcctgttcgacttcctgaacaacaaaaaagagattgagcaggacagcctgctgagcgcccacttcaagattaagaagaaggacaaagaaaactaccggtggaactacgtcgaggacaagaagtatccctgcaacaccacacacgcttccctgctgtcccggctgaagaaaatcggcgtgtccgccaacttcctgaccaaagaaatcgaggaacacctgtggcacatcctgtacagcatcaatgacaaagaagagatctataaggccctgctgaagttcgccaagaagtacggcatcgaggacagcatcagctttgccgaggaactccagaaagaaatcttccaaaaagagtacgccagctacagcctgaaggccatcaagaaactgctgcccctgatgagatgcggcgactactggaaagaggataacatcgacaccaagaccaaagagcggatcgagaagattatcaccggcgagttcgacgaagaaattgacaacaaagtgcgcgagaagctcgagaactacaccaatgtgtcccagttcaagggcctgcctctgtggctggcctgttacgtggtgtatggcagacacagcgaggctaaagaaatcaccaagtggaaccagcctgaggacatcgatgagtacctgaagcagttcaagcagcactccctgaacaatcccatcgtggaacaggtggtcaccgagacactgagagtcgtgcgggacatctggaagcaagtgggcaccattgacgagattcacgtggaaatgggccgcgagctgaaaaagaccaacaaagagagagagacaatcagcaagcagaatatcgagaacgagaacaccaacctgcggatcaagcagattctgaaagagttcaaagagagctacccggacatcgaggaagtgcggcctcatagccctagccagcagaccatcttccggatctacgagaattacgccctggccaacctgagcaagaccgacaaggactacaaagagattatcgacatcagcaagaaggctaaccccaccagcaacgaggtggccagatacaagctgtggctcgagcagaagtatcagagcccctataccggcgagatgatccctctgagcaagctgttcacctccgcctaccagatcgagcacatcatccctcaggccagatatttcgacgacagcttcaacaacaaagtcatctgcgaggccgaagtgaacggcctgaaggatagaatgctgggctacgagttcattaagaacaacggcggagccatcatcgagctgtctggcggcaagaccgtgaagatctttaccgacgagcagtacgtggacttcgtcaacaagcactacttcaacgtgaagaagaagaacctgctgctgacagacatccccgacgacttcatcaaccggcagctgaatgacagccggtacatctccaagctggtcaagaacctcctgagcaacattgtgcgggaaaagctggaaaatggcgagtatgaggctgaagtgaccagcaagaacctgatcacctgtaccggcaagattaccgacagactgaagcaggactggggactgaacgatgtgtggaaccggatcatcctgcctagattcgagcggctggaagaactgatcggcaaagaagagttcaccacctacaacgaagagggccacaagatccccgccatgcctctggatctccagcagggcttcaagaagaagcgcatcgatcacagacaccacgccatggatgccatcgtgatcgcctgtgccaccagaaaccatgtgaatctgctgaacaatgagagcgccctgagcgagaacaaggccaacagataccagctgcagtacaagctgagaaagcgcgagaaagccaagatcaacggcgaagagaaagaggtgttcaaggccttctacaagccctgggacaccttcacacaggatgccgaacaggtgctgagaaacatcgtggtgtccttcaagcagaacctgagagtgctgaccaaggccaccaacaagacccagtacatcgacaagaaaaccgggaagatcaagctgaagccccaagagaaaggcgagctgctggccatcagaaagagcctgcacaaagaaaccgtgttcggcgaagtgaatctgagggaaatcaaggacattaagctgagcgaggctctgaacaagccccagagcatcgtcgacaaagaactgaaggccgaggtgtacaggctgaaagctctgggcaaagacgacaaggccattatcaagcacttcaaggataacaaggatatctggaacagcgagatcaagaacgacaaagtgaaggtctactacttcaccaaagagacaaacgaccggtacttcgccacaagaaaggccatcggcgacatcgtgtccaagaaagaggacatcaagtccatcaccgacagcggcatccgcaagattctggaaaaccacctggaagccaacgacggcaatctggaaaaggcttttagccccgagggcatcgaagagatgaacaagaatatctacgagctgaacaacaacaagccccaccagcctatctacaaggcccggaagtttgagaaggccgacaagttcgccgtgggcaacagaggcaacaaaaacaaaaagttcgtggaagccgccaaggggaccaatctgttcctggccatctatgaactgaacgacaagcggtcctacgtgacaatcccactgaacctggtcatcgactgccagaagaagtataagaacaattggaaagagcagctggactccgtcctgaaagaagagaaatacgtcaaggacagcaagacgaagctgctgttcgtgatcagccccaacgacctggtgtacctgcctatccaagaggaactcaagaccaagcagtacagcttcgaccggtctagaatctacaagttcgtgtccagcagcggcaaccaggcctttttcgtgccctactttatcgccaacgccatcatcaagacaaccgagctgggcgctaacaacaaggccgaaagagcttggagcggggagatgatcaaagaaacatgcatccccatccaggtggaccggctgggcaatatcaagcccctgggatcc

SEQ ID NO: 204 - DNA, 4347 bp, Artificial Sequence
  OMNI nuclease sequence
ggtaccaagaagatcctgggcctcgacctgggcaccaattctattggctgggccgttgtgaacgaggccgagaaagagggcgagcagtctagcattgtgaagctgggcgtcagagtgaaccctctgacagtggacgagcagcagaacttcgagaagggcaagagcatcaccaccaacgccaacagaaccctgaagcggagcatgcggagaaacctgcagcggtacaagctgcggagagagaacctgatcagcatcctgaaagagaacggcttcatcagcgacgacaccatcctgtccgagaacggcaacaggaccaccttcgagacatacagactgagagccaaggccgccagcgaggaaatctctctgcaggattttgcccgggtgctgctgatgatcaacaagaagagaggctacaagagcagccggaaggccaagtctacagaggaaggacagctgatcgacggcatggaagtggccaagagactgtacgacgagtgtctgacacctggccagctgagctacgagatcatcaaaggcggcaagaaacatctgcccgacttctacagcagcgacctgcaggacgagttcgacaagatctggaacgtgcagaaaaccttctaccacgagctgctgaccgacaacctgcgcgagaatctgaagggaaagaacaagacccagacctgggccatctgcgccaagccttttggcatcgagggcatcaagagaaccaccaaaggcgtggaacagaagctcgagaactacaagtggcgcgtgacagccctgaacgagaagctggatctggaagaactggccgtggtgctgcaagagatcaacggccagatcagcaacagctctggctacctcggcggcatctccgacagaagcaaagagctgtacttcaacaagcagacagtgggccagtacctgatggaaaacctggacgccgacagcaactacagcctgaagaaccaggtgttctataggcaggactacctgaatgagtttgagaagatttgggagacacaggcccagtaccacaaagaactgctgacccctaagctgaagaaagaaatccgggacgtcgtgatcttctaccagcggagcctgaagtcccagaaaggcctgatctctgtgtgcgagctggaaggcaaacaggtggaaagcgagaagaacgggaagaagtacatcaagacaatcggccccaaagtgtgccccaagtctagccctctgttccaagagtttaagatctggcagatgctgaacaacgtccagatctcctgcaagagcgtgcccgacaagcagaagaacatttggaacgacaaccaggggaagcgctttctgtcccaagaggaaaaagagaagctgttcgtcgagctgtcctacaaagagagcctgagcaaggccgacgctctgaagctgctgttcaacaacagcaaggactacgacctcaactacaagatcctcgagggcaatagaacccagagcgacctgttcaaggcctaccagaccatcatcgagatgagcggctacgatgagtacgacctgagcatcatgaacagcgagaaggccgtgcacaagctcaaagagatcttcgacggcctgggctacaacagcgacatcctgatgttcgacagctccctggaaggccacaagctggaacagcagagcatgttcagactgtggcacctgatctacagcttcgagggcgacaactccgtgatcggcaacgagaaactgatcgagaagatccaggataccttcggcttcgagcgggaatacgccaccgtgatcgccaatgtggtgttcaaggatgccggcgagtacagcagcctgtctgccaaggccatcagaaagatcctgcctcacctgaaggacggcaacgattacagcgtggcctgtgaatacgccggctacaaccacagcaaaagcagcctgaccaaagaagagatcgagaacaaggtgctgaaggacaaactggacctgctgcctcggaacagcctgagaaaccccgtggtggaaaagatcctcaaccagatgatcaatgtggtcaacagcatcgtggacacctacggcaagcccgacgagatcagaatcgaactggccagagagctgaaaaagagcgccaaagagagagaggaactgaccaagtccatcaactccaccaccaagctgcacgaggaatacgtgaccatcctgaagaatgagttcggcctgagccgggtgtcccggaacgacatcatcagatacaagctgtacaaagaattggagtgcaacgggtacaagaccctgtacaccaacacctacattcccaaagagaaactcttcagcaaagagtttgacatcgagcacatcatccctcaggccaagctgtttgacgacagcttcagcaacaagacactggaaagcaggcaggccaacctggacaagagcaataccaccgcctacgacttcgtggccgccaaatatggcgacgactacgccaacggcgagtataagagccggatcgaaaagctgtataaggacgggatcatcaccaagaccaagcgcgacaagctgctcatgaaggaagccgacattcccagcggctttatcaaccgggacctgcgggatagccagtatatcgccaagaaggcccgcgagatcctggaagatctggtgcactttgtggtgcctaccaccggcagcgtgacagacagactcagagaggactggcagctggtcaacgtgatgcaagagctgaactggaacaagttcaaccagctgggcatgacctactacgagcaggacagagatggccggcagatccccaagatcaaggactggaccaagcggaacgatcacagacaccatgccatggacgccctgacaatcgccttcaccaagcggtccttcatccagtatctgaacaacctgaacgccagagtggaaaagggcgtcgaggactggatcgacctggacatggtggacgtgtccaagctcgacaaagaaaagcggaccagcgtggtgtactccatcgagaaaaaagaactgtaccgggacaagaaggggaagctgcggttttgccctcctatgcctctgcacgagttccgggccgaagtgaagagacagctggaatccatcctggtgtccaacaaggccaagaacaaagtggtcaccaacaacgtgaacaaagccaaaaacaacgtcgagagctttatccagaccaaggacggcgaagtgcggaagatcaaaggacaggtggtcaagacccctcggggccagctgcataatgagacagtgtacggctgcagcaagcgctacgaggctaaagaagaaaaagtcaacgccagcttcgacgccgagaagattaagaccgtggcctgcaagcggtatcgcgaggctctgatggaacagctgaacaagtttggcggcgacgccaagaaagccttcaccggcaagaacgccatcgacaaggcccctatttggctggatgccctgcacaccgagaaggtgcccgagaaagtgaaaaccgtgggcttcgtgtacatctacaccatccggaaagaagtgggccccgatctgaaggtggacaaggtggtggatacccggatcaagaagattctggaaagccggctgaacgagttcggaggggatgctaagaaggcctttagcaacctggatgagaaccccatctggctgaacaaagagaagggaatcagcatcaagcgcgtgaccattaccggcgtgtccaatgctgaagccctgcacgacaagcgggacaaagacggcaatctgatcttcggcgacgacggccagaaacagcctgtggattttgtgtccaccagcaacaaccaccacgtggccatctacagaaagcccaagctggataagaacaaccagcctatgctggacgaaaagggcaacatcctgtacgagctggacgagaaaatcgtgtccttctacgaggccaccagcagagccgtgcagcatctccctatcatcgataagacctacaagaaggacgaggattggcagttcctgttcaccatgaagcagaacgagtacttcgtgttccccagatacgacgagaatgggaacatgatcttcaaccctctggactatgacgagagctggtacagaaaccctgacaactacgccgagatcagccccaacctgttcagagtgcagaagatcgccaccaagaactactttttccggcaccacctggaaaccacagtggaaacacctaaggctctggccggcatcacctataagcctcagctgggcctgaacggcatcgtgggaattgtgaaagtgcgcgtgaaccacatcggacagattgtggccgtgggcgagtacggatcc

SEQ ID NO: 205 - DNA, 4122 bp, Artificial Sequence
  OMNI nuclease sequence
ggtaccaagaaggtgctgggccttgatctgggcacagcctctattggatgggccttcgtgaatcaggccgagtctagcggcgagcacagctctatcattgccaccggcgtcagagtgaaccctctgaccacagacgagaaggacagcttcgagaagggcaaagccatcaccaccaacgccgacagacggcagaaacggggcatgagaagaaacctgcagcggtacaagctgcggcgggaacatctgctgagcgtgctgagaagagaaggctggatcaacgaggacaccgtgctgtctgaacagggcgccagaagcacctaccagaccttcagattcagagccgccgctcctgccgaggaaatcagcctggaagatctgagccgggtgctgctgatgatcaaccggaagagaggctacaagagcaacagaaagaccgacaagggcgaagagggccacctgatcgatggcatggaagtggccagaacactgtacgacgaaggcctgacacctggcgagtatagcctgagactggtggacgagggaaagagagtgctgcccgactactacagatccgacctggtggccgagctggaaaagatctggctgtcccagaaagtgtggtatcccgacatcctgaccgacgagttcaagaacagcatcgagaacgacggccggaacggcgtgatcaagaagttcctgagccggtacagcatctacaccgccgacaacaaaggcaaggacaagaagaaaacagccctcgagtggcgcgtgaaggccctgacagatcagctggacaaagaaaccctggcctacgtgatcgccgatctgaagggcgctatccagggcagctctggatatctgggcgccatcagcgaccggtccaaagaactggtgttcgacaacttcaccgtgggccagtatctgtggcggcagatcgagcaggaccccaactacagcaccagaaacaaggtgttctaccggcaagactacatggacgagttcgagcggatctgggagtgccagaagagatttcaccccgagctgaacgacgagctgaagtccgagatccgggacgtcgtgatcttctaccagcggagactgaagtcccagaagaacctgatcagcttttgcgagttcgaaacccgggacatcacagtggaagaggccggtgttcagaaagtgcggaagtgcggatgtagagtggcccctagaagcagcctgctgttccaagagtttaagatttggagcgtcctgaacaacatcagcgtgaagtccagaaccgacggcagcaccgtggaagtgaccgatgagatgaagcggaggctgttcgactacctgagcgtgaacgacaagatcaccgtgtccgacatgctgcggctgtttgagctgaagcccaagggctacgacgtgaactaccgggacattcagggcaatctgaccctggccgaactgtaccggaagttctttgaggtggtgtccgcctctggcaatggcgagcatgatctggccaagctgagctacagcggcgcctacaagatcctgtttgaggtgtacagcgccctgggcttctctaccgagatcctgagctttgacagctccctgcctaaagaggaatacgagcggcagcccctgttcaagctgtggcatctgctgtactcctacgagggcgacaatagcaagacaggcgacgagagcctgatcagaagagtggccgagatctgcatgatgcccgaagagtacgcccggattatcgcctccgtgaagtttctggacgactacgcctctctgagccacaaggccatgagaaagatcctgcctcacctgaaggatggctacgcctacgatgaagcctgtgccagagccggctacaaccacagcagctccatgaccaaagaagagaacgaggccagagtgctgaaggacagactggaagtgctgccaaaaggcgccctgagaaaccccgtggtggaaaaaatcctgaaccagatggtcaacgtggtcaacacactggccgacgagtacggcaagcctgacgagattcacatcgagatggcccgggaactgaagcagaacaccaagcagagagagaaggccaccaaggacatcagcgagaataccaagcgggacgaagagatcgtgaagaagctgcaagaagagttcggcctgaaatacgtgtccaagaaggacatcctgcggtacagactgtacgaggaactgaaacccctgggctataagaccctgtacagcggccagtacatccccaaggacaggctgttcagcaactccatcgacatcgagcacatcatccctcaggctctgatgttcgacgacagctacagcaacaagaccctggaattttccgacgtcaaccgcgacaagggaaaagagacagccttcgactacgtgtcccggaagtatggccctgctgagctggatgcctacaagctgagagtgcacgagctgtactctcacgaagtgatcagcgcccggaagcgcgacagactcctgatgaagcagagcgacatccccagcgacttcgtgaacagagatctgaccaacagccagtatatcgcccgcaagagcacagagatgctgggcgaatttgtgcgggacgtgatgcctaccacaggcagcattacagctctgctgagagaacagtggcagctggtggatgtgatgaaggaactcaacctgcctaagtaccggcaggccggaaagacctttaccgtgaccaagtctgacggccagagcctcgagaagatctccgacgactggaccaagagaaacgatcacagacaccacgccatggacgccctgacaatcgccttcactcggagaagccacatcaaggtgctgaataccctgaacgccctgcctggcagcgaggactacagcctgaaagaaatggtcacaaccgtgctgcccaatcggaagcggatcttcacacctcctatgcctctgggcgagctgagaagcgcctttaaagaggccctggaaagcaccctggtgtccatcaaggccaagaacaaggtggccacacggaacgtgaacaagtccaagatcaaggacggcacaatcgccgtggaaacactgacacctagaggccagctccacaaagagcaggtttacggcaggcggagagtgtacgagacattcgaagtgacagtcggcggcaagatggatgccgccatgattgcttcagtggccagcagagccgagagggaagccctgaaaagacggctggaagcctttggcggagatcccaagaaggcctttaccggaaagaactccctggaaaaaaaccctctgtacgtggacgagctgcagagtgtggctgtgcctgccaaagtgaagtgcgtcagaatgaaggaagtgtactccatccggaaagagatcggccccgacatctccgtggataaggtggtggatggcagagtgcgggcactgctgaaagctagactggatgagtacgacggcgaccctaagaaagcctttgtgaacctggaagagaagcctatctgggtcgacgagtccaagggcatcaagatgaagaaagtgaccgtggctgagaacttcgacctgtgcgccatccgggacaagagagacaaagacggcaagctgatcctggacagcgccggcaataccattcctagcgattacgtgaacccacggaacaaccaccacattgccatctacgaggacgccgacggcaactaccaagaacaggtcgtgacactgctcgaggccctgcagagaaaaacagccggcatgcctgtgatcgacaaggcctaccacgaggacctcggatggaagttcgtgttcagcatgaagctcaacgagatgttcgtgtttcccgatccagccaccggcttcgacccaagcgaaatggatctgatggaccccgccaactacgccagcatcagccccaatctgttccgggtgcagaagctgagcagcaagtactacgtgttcaggcaccacctggaaaccgctctggaagatacccctgagctgagagacatcacctggcggagaatccagaactacaacgccctgaagggcatcgtgaaagtccggatcaaccacatcggcagaatcgtggccgtgggcgaatatggatcc

SEQ ID NO: 206 - DNA, 4122 bp, Artificial Sequence
  OMNI nuclease sequence
ggtaccaagaaggtgctgggcctcgatctgggcacaacatctattggctgggccctcgtgaatcaggccgaatcttctggcgagcacagcagcattatcgccaccggcgttagagtgaaccctctgaccaccgacgagaaggacagcttcgagaagggcaaagccatcaccaccaacgccgacagacggcagaaacggggcatgagaagaaacctgcagcggtacaagctgcggcgggaacatctgctgagcgtgctgagaagagaaggctggatcagcgaggataccgtgctgtctgaacagggcgccagaagcacctaccagaccttcagacttagagccgccgctcctgccgaggaaatcagcctggaagatctgagccgggtgctgctgatgatcaaccggaagagaggctacaagagcaacagaaagaccgacaagggcgaagagggccacctgatcgatggcatggaagtggccagaacactgtacgacgaaggcctgacacctggcgagtatagcctgagactggtcaacgagggcaagagagtgctgcccgactactacagatccgacctggtggccgagctggaaaagatctggtccagccagaaagtgtggtatcccgacatcctgaccgacgagttcaagaacagcatcgagaacgacggccggaacggcgtgatcaagaagttcctgagccggtacagcatctacaccgccgacaacaaaggcaaggacaagaagaaaacagccctcgagtggcgcgtgaaagctctggcagatcagctggacaaagaaaccctggcctacgtgatcgccgatctgaagggcgctatccagggcagctctggatatctgggcgccatcagcgaccggtccaaagaactggtgttcgacaatctgaccgtgggccagtatctgtggcggcagattgagcaggaccccaactacagcacccgcaacaaggtgttctataggcaggactacatggacgagttcgagcggatctgggtctgccagaagagatttcaccccgagctgaacgacgagctgaagtccgagatccgggacgtcgtgatcttctaccagcggagactgaagtcccagaagaacctgatcagcttttgcgagttcgaaacccgggacatcacagtggaagaggccggcgtgcagaaagtgaagaaatgcggatgcagagtggcccctcggagcagcctgatcttccaagagtttaagatttggagcgtcctgaacaacatcagcgtgaagtccaagaccgacggcagcaccgtggaagtgaccgatgagatgaagcggaggctgttcgactacctgagcgtgaacgacaagatcaccgtgtccgacatgctgcggctgtttgagctgaagcccaagggctacgacgtgaactacaaagagatccagggaaatctgaccctggccgaactgtaccggaagttctttgaggtggtgtccgccagcggcaacggcgaacatgatctggccaagctgagctacagcggcgcctacaagatcctgtttgaggtgtacagcgccctgggcttctccaccgagatcctgacttttgacgccagcctgcctaagaaagaatacgagtgccagcctctgttcaagctgtggcatctgctgtactcctacgagggcgacaatagcaagacaggcgacgcttccctgatcagaagagtggccgagatctgcagaatgcccgaggaatacgcccggatcattgcctccgtgaagctgctggatgactacgcctctctgagccacaaggccatgaagaagatcctgcctcacctgaaggacggctgcgcctatgatgaagcctgtgccagagccggctacaaccacagcagctccatgaccaaagaagagaacgaggccagagtgctgaaggacagactggaagtgctgcctaaaggcgccctgagaaaccccgtggtggaaaaaatcctgaaccagatggtcaacgtggtcaacacactggccgacgagtacggcaagcctgacgagattcacatcgagatggcccgggaactgaagcagaacgccaagcagagagagaaggccaccaaggatatcgccgacaataccaagcgggacgaagagatcgtgaagaagctgcaagaggaatttggcctgaaatacgtgtccaagaaggacatcctgcggtacagactgtacgaggaactgaaaagcctggggtacaagaccctgtacagcggccagtacatccccaaggacaggctgttcagcaactccatcgacatcgagcacatcatccctcaggctctgatgttcgacgacagctacagcaacaagacactcgagttctccgacgtcaaccgcgacaagggaaaagagacagccttcgactacgtgtcccggaagtatggccctgctgagctggatgcctacaagctgagagtgcacgagctgtactctcacgaagtgatcagcgcccggaagcgcgacagactcctgatgagacagagcgacatccccagcgacttcgtgaacagagatctgaccaacagccagtatatcgcccgcaagagcacagagatgctgggcgaatttgtgcgggacgtgatgcctaccacaggctctatcacagctctgctgagagaacagtggcagctggtggatgtgatgaaggaactcaacctgccaaagtaccggcaggccggcaagacctttaccgtgacaaagtctgacggccagagcctcgagaagatctccgacgactggaccaagagaaacgaccacagacaccacgccatggacgccctgacaatcgccttcactcggagaagccacatcaaggtgctgaataccctgaacgccctgcctggctctgaggactacagcctgaaagaaatggtcaccaccgtgctgcccaatcggaagcggatctttacccctcctatgcctctgggcgagctgagatctgccttcaagtctgctctggaaagcaccctggtgtccatcaaggccaagaacaaggtggccacacggaacgtgaacaagtccaaagtgaaaaacggcacgatcgccgtggaaacactgacccctagaggccagctccacaaagagcaagtctacggcagacggaaggtgtacgagccctttgaagtgacagtcggcggaaagatggatgccgccatgattgcctcagtggccagcagagccgaaagagaggccctgaaaagacggctggaagcctttggcggagatcccaagaaggcctttaccggcaagaactccctggaaaaaaaccctctgtacgtggacgagctgcagagtgtggctgtgcccgctaaagtgaagtgcgtcagaatgaaggaagtgtactccatccggaaagagatcggccccgacatctccgtggataaggtggtggatggcagagtgcgggcactgctgaaagctagactggatgagtacggcggcgacccaaagaaagccttcgtgaatctggaagagaagcctatctggatggacgagagcaagggcatcaagatgaagaaagtgaccattgccgagaacttcgacctgtgcgccatccgggacaagagagataaggacggcaagctgatcctggacagcgccggaaacacaatcccctccgattacgtgaaccccagaaacaaccaccacattgccatctacgaggacgccgacggcaactaccaagagctggtggttacactgctcgaggccctgcagagaaaaacagccggactgcccgtgatcgataagacctaccacgaggacctcggatggaagttcgtgttcagcatgaagctcaacgagatgttcgtgtttcccaatcctgccaccggcttcgaccctagcgaaatggatctgatggaccccgccaactacgccgccatctctcccaatctgttcagagtgcagacactgagcagcggcgactaccggttcagacaccatctggaaacctccatcgagagcgacaaagagctgaaagacgtcacctggaagcggctgaagtctctgtctagcctgaagggcatcgtgaaagtgcggatcaaccacatcggacagatcgtggccgtgggcgaatatggatcc

SEQ ID NO: 207 - DNA, 3672 bp, Artificial Sequence
  OMNI nuclease sequence
ggtaccgaaaagatcctgggcctcgatctgggcgtgtcctctattggatgggccgtgatcacccaggacagcgagaacgaggaaaacaacaccatcctggactgcggcgtgcggatcgtgcctctgaactctgatgagatcagcgagttccagaaaggcggcaacgtgcccaccaacgtgaagagaaggcagagccggggcatgagaagaaacctgcagagataccggtggcggagacacagactgtaccaggttctgcggagactgggcatgatgcccgacagggacctgatgaacagattctgccctcaaggcctgtacgccctgagagagagagcactgagagagcctctgagcctgcaagagatcggccggatcttcatccacctgaacaactggcggggctacagaagcaaccggaaagaacaggtggacaaggacggcaagaagcccagcgagtatctgaagcagatcgccgagaatgagagcatgctgaacggccagaccatcggccagtactttgctgctaggctgagagaggacgagacatacagagtgcggcagcagatcttcaaccgggaaacctacatgagagagttcgacctgatctgggccacacaggcccagtatcatcctcaggtgctgaccgaggccaaccggcacctgatcagagacaagatcatctaccggcagaggcccctgaagtccgccaagaaaacagtgggagagtgcgccctggaatggtactacgccctggacaaagagacacacaagcccatcgtgctgcccaatggccagtatagaatcgtgcggcctaagtgcgcccctaacacctctccactggctcaagtgtgcaaagtgtgggagagcatccacaacctgcggatcaatgatgccctgggccagcctagaaagctgtccctggaagagaagaagaagatcttttacaccctgcagaacatggacaagaacctgaaagagcgggacctgctgaccaaggtgctgaagctgagccctaagctgtacaccgtggaccggctggtcaaagagaagggcctcgagtacaatcggacaaaggccgtgctggcctccgccttcaagaagatgggcatccagagagatgacctgctgcagttcgagcccgagatcgaagaggttgactgggtcaaccctgagacaggcgaagttggcagaaggctgcaagtccggggcgattttgatcagcagcccctgtatcggctgtggcatctgatctacgccaccgaggatgagcacacactgatccggctgctgcaagaaagatacggctttacagaggctcaggccgccgagctggccaagatcgatttcaattctgccggctacgcccggaagtcccacagagctatgagaaggctcctgcctcactacgaggaaggcctggattacgctgctgcttgtcaggccgctggctacagacacgctcagtatctgaccaccgccgagaacgaagccagacagctgctggacaagctggaagtgatccccaagaacagcctgcggaaccccgtggtcgagaagatcctgaaccagatgatccacctggtcaacgacctgattgagacatacggcagacccgacgccatcagagtggaactggccagagaactgaagcagtctgcccaagagagagaagccaccagcaagcagatgcggagcagagagagggaaaacgccaagatcagagaggaaattgccgagctgctgaacatgcccgccgagtctatcaccagagccatggtggaaaagtaccggctgtaccaagagacagacggcatcagcctgtacagcggcaagaaaatccctctggccgtgttcctgagaggcgaaggcgtggacgtggaacacatcatccccaaggtgtccagattcgacgacagcttctccaacaagaccttctgcgagacagccctgaatcagctgaagtccaacctgaccgcctacgatttcatgaaggcccagcctgttcctggcctgcagagctttgaggcctacaccagaatggtcaaggatctgtacgacagcaagaagatcagccgcaccaagtacaacaacctgatgatgaccggcgagcagctcctggaagatacaggatttctgcagcggcagctgcgggaaacccagtatattgcccggaaggccctggaaatcctgcggcaagtctgccggaaagtgaatagcaccaccggcagcgtgaccgactttctgagacatcagtggggctgggacaacgtgatccacgatctgagactgccccagttcaagcaggccgagctgacagagatcagcttcaagaacaacggcacccagcctatcgaagtgatcaaaggctggaacaagcggatggaccacagacaccatgcactggacgctctggtggccgcctgtacatctcagtctcacatccagcggatcaacaacctcaaccagatcctggccggcaaagagggctccgagagaagagaggaactgctgagaatcggcagagccaagtttatcgccggcaagaggcctttcagttacgcccaggtggccgaggccatcagcaatatcctggtgtctcacaagcagagccacagagtggccaccaggtccagaaatagacccaagggcagcgacaaggtgcagatcacactgacacctagaggcagcctgcacgaggaaaccgtgtacggcagaatcaagcagtacaagaaggtgctgctgaatacctccttcagcctggacaacctggctcagatggcacaccctcaccagagagagctggttgaagcaagactggcccagtacgacaacgaccccaagaaggcctttgagaacctggatcagaaccccatcctgtacggccccgatggcatcaagagactgacacacgtgaccctgtgggagtacaccctggtggctagaaagtctatcgcccctgacctgagcgagaagtccgtggaaaaaatcgccgacaacaaagtccggcagctggtgcaggctagactggaatctggcggcggaaagagcaaagaggctttcaagaacgtcggcaatgagcccatcatcctgggaaagtaccccgtgaaaagagtgcgggtcaagaacccagccgagaaagtgattgccctgcctagaggctttgtggaacccggctctaaccaccatatcgccatctacagagatgccagcggagagctgtgcgagcacgtggtcacattctgggaagccttccagagagtcagactgggactgcccgccatcatcacagatattgccgccgctctggaccacatctctcaattgcctggcgaactgcctccactgcagctgcctgaaaatcctgagtggcagttggtggtgtccctggccagaaacgacatgttcgtgttcggactggaccccagcgagatcgacctgaccaatcctaagaacagaaagaccgtgtccaagcacctgttcaaagtgcggaagatcaccaaaggcggctactggttcctgcaccacctggaaaccacacctctggaagatgtgatcagcaagaaagtgggcagatgcaagcagtgcagcagcagctctctgacaggcgctgtgaaagtgaaagtcaaccggctgggccatatcgtcggcatcggccctagtatcggatcc

SEQ ID NO: 208 - DNA, 4515 bp, Artificial Sequence
  OMNI nuclease sequence
ggtacccggaagaagatcatcggcctggacctgggcacaaatagcatcggctgggcctacatcgagcggaatagcgaactcggcgacggcaatatcgtggacgccggctctagaatcatccccatgcctcaggacgccatctctaagtacgagacaggcaatctgcagagcagcgcctctgtcagaaccggctacagatccatgcggcggctgtatgagagaagcgagctgagaagatcccggctgctgcgggtgctgaatatcctgggatttctgccccagcactaccgcgacgccatcgacttcaaagtgcacctgggccagttcaagaaccacggcgaacctctgctgccctacaagaaggacaccaacggcaagaacaccttcatcttcaccgagagcttccacgagatgctggaagatatgcggacctaccatcctgagctgctgagcaacggcagaaagatcccctacgactggaccatctactacctgagaaagaaggccctgagccagcctatcagcaaagaggaactggcctgggtcatcctgaacttcaacaccaagcggggctactaccagctgcggggaaaagaggaagagatcgccaccaacgagcaccagttctacgacgtgctggaaatcgacagcgtggaagagacaggcctgaacctgaagaaaaagggctacaagtggttcaaggtccacttcaccaatggcaaggtgcagaaccggacatggaaagaggccccttgcagagtcggcgacaaggtggaatgcatcatcacctacctcgtgaagaaggacggcacccctaagatggacgagaacggcgagcagctgtacaagatcacagcccctgatcctaccgattggaccctgaggaagaagcggaccgagtctatcatcaccaagggccacgtgaccgtgggcgagtacatctacgatcatctgctggtggaacccgacgacaagatccggggcaaatacgtgcacaccatcgagaggaagttctacaaagaagaactgcggaccatcctcgagaagcagaaagagttcatccccgagctgcgggacaagaagctgctgctggcctgtatcagcgagctgtaccacaacaactacgcccactgcagcgtcctggaaaagcaggacttcaccagactgttcgtggacgacatcatcttctaccagcggcctctgaagtccaagaagtccctgatcgccgactgtcccctggaatattaccccttcaaggacaaggatggcatctggaagcacagacccatcaagtgtacccctcggagcaaccctctgttccagaccttcagactgtggcagttcatccagaacctgcggatctaccgcagagaggaagaacacgaaggcagactgctgctcgatgtggatgtgaccggccagtttctgagcacccctgaggactactgcgacctgtttgactggctgagagccaagagcgacatcacccagaaacagctgctggcttaccctccattctgcctgggcaagaaggccaaggactaccggtggaactacgtggacgatgacaagcacgcctatcctctgtgcagcacccaccacgatatcagcaaggccatcaaagaggtggacgataccctgagcctgagcgccaaagaagagaagtctctctggcacatcctgtactccgtggatgacagatacgatctggaaaaggccctgcggcacttcgccagcaagaacggcatcgacgaagagaacttcgtgaacgccttcatcaacttcaagcccttcgacaagagctacgccagctacagcgagaaggccattaagaaaatgctgcccctgatgtccaccggcagatactggaatgccgagggaatcgatgcccacaccatgcagagaatcagccacatcgtgaatggcgaggtggacaagagcatcagcaacagcgtgcgggaaaagtgcgccggactggacagaatcgagaagtaccagttcctgcctgtgtggaaagtgtgctacatcatctacaaccggcacagcgaggccaccgacaccatcagatggaccacacctgacgacatcgacacctatctgaagaaagagctgcggcagggcaccctgagaaaccctgtggtggaatctgtgctgagcgaagccctgagagtcgtgcgagatgcttggagacagtacggcagacccgacgagatccacattgagatgggccgcgacctgaagcagaacaaggcccagagacagaaagccaacaccatcatgctgaacaaccagcagaccaacctgagaatccggtgcatgctgcaagagttcgccgatcctgacttccacattgccaacgtgcggcctcagagcccttctcagcaagagctgctcaagatctacgagcagggcgtgttcgacagcatcggcgagatccctgacgatatccagaccatcatcgaccacatcggcaacaagaatcacggcatctccaagtccgacatgctgcggtacaagctgtggctcgagcagaagtatcagagcccctacaccggctgtcccatcagcctgagcagactgtttaccagcgagtacgagatcgagcacgtgatcccacagagccggtacttcgacgacagcctgtccaacaaagtgatctgcgaaaccgaagtgaaccgcgtgaagggcacaatgctggcccacgagttcatcaagagcaaaggcggcagcatcgtgaaaggcacaggcggcaagcagtataagatcctggatgccgctcagtacgaggatttcgtgaagtcccactacgtgaccaacaagagcaagatgagacacctgatgctggatgacatccccgacagctttatcaacaagcagatcaacgacacccggtacatggcccgcaaggccctggatatctttagccaccttgtgcgcgaggaaacaaacgacgacgccgccatcagcaagaatgtgatcgcctgtagcggcgccatcaccgacagactgaaaaaggactggggcctgaacgatgtgtggaacgacatcgtgtccagccggttccagcggatgaacgatatcacccacagcagcgattacggccagtgggtcaacaaaggcggaaagcggtacttccagatcaacatccctctggaaatctccaagggcttctccaagaagaggatcgatcaccggcaccacgccatggatgccatcatcattgcctgcaccacacactccatcgtgaactacctgaacaacgcctctgccgccgaactgggagccagacatgatctgagaagcgccgtgtgcttcaaggataacaatgtggacggcagcggcagctacagatggacagtgaagaagccctggcagagcttcacccaggatacccactcttgcctggaacacattgtggtgtctttcaaacagaacaagcggctgatcacaaaggtgtccaaccggtactggcactacagagatggcaagaagattctggaccggcaagtgaagggcgatctgctggccatcagaaagtctctgcacaaggccacagtgtctggcgccctgtacatgcctgaaatgaagcgggtgtccctgaaggtggccctgcaggacatcaatagcatctgcgacgccaaggccagaaaagagatccaccacatcatcaacgacctgtacaacggccacgccgacaacgccacactgctgaagtactttaaggcccggaagttcctggtcaacggcattgacttcagcaagctgaacgtccgggtgctgcccacacagcctaattactctgcctctagagtggccctggacagcacctttaccgagaaggacatcgagaaagtgaccgacaccggaatccaggccatcctgcgtagacatctggcccactatgtgaacgagcggggcgagtatgatagcacagccgccttttctgccgagggcattgccgtgatgaacgagcacatctccgagctgaacaatggaaagccccacaagcctatcctgaaagtccggaagaaagaaaccatcggccagaaattcaacgtgggcaccgtgggctccaagaacaagaagttcgttgaggccgacaagggcaccaacctgttttacgccgtgtacgccaacgccgacggcatcagaagctacgagagcatccctatgaatatcgccattgagcggctgaagcacaagatggatgtgtccccaagcaccaacgacaacggcgataagctgctgttcgtgctgtctcccggcgatctggtgtatctgcctcaagagggcgaacacgtggcactgcccctggacaacagccggatctacaagatggtgtcctgtagcaagacccagtgctgcttcgtgccctactacgtggccaatgtgatctgtgacaaagtggaatacggccctcacaacaaggtcgagagaagcctggacggaatcatggtcaagaccagatgcgtgaagctgaaagtggacagactgggccacatctctgtgggatcc

SEQ ID NO: 209 - DNA, 4446 bp, Artificial Sequence
  OMNI nuclease sequence
ggtaccaacgccaagcactacatcctgggcctcgacatgggcaccaattctatcggatgggccgccatcgatgccgagacacagcagatcattgccaccggcagcagaatcatccccatggacgagagatccatcaccgacttcgataagggcgtgctgcagtctagcgccgctcagagaacactgtaccaccggatgcggatcaccaacgagagagccaagcagcggagagaaagactgctgcgggtgctgaatatcctgggcttcctgcctgagcacttcaggcagcagatcgacttcgagaagcacttcggccagttcaagaaccacagcgagcccctgatcgcctactgtcctgatgctaccggcaagaaagagttcctgttccggcagagcttcgaggaaatgctgaacgagttcagacaggtgcaccctgaactggtggccgagggcaagaagatcccctacgactggattctgtactacctgcggaagaaggccctgacacagcccgtgtctagagaggaactggcctggattctcctgagcttcaatgccaagcggggctactaccagctgagaggcatgtctgatgagctgcagaccgccgacgaccagaaacagttttgcgtgctgaccgtgatgcaagtgaaccagggcaaagaagtgaaggccggcagccagacctacgagtaccacatcgtgtacgacaacggcaaagaggaaactaagaagggcaagcaggccccttatcctatcggacaccagtttgaggccatctgcaccaccaagaccaacaaggatggcaccaccaccttcagcaccagcacacctgatcctgaggactggaccctggtcaagaagaaaaccgagcacgacatcaagctgagcggcaagacagtgggcgcctacatctacgatgagatcctggctcagcccagcgtgaaagtgcggggaaagctgatccacaccatcgaccggtccttctaccggaacgagatggaacagatcctgagagcccagaccgccttccacaaagaactgagagatgacgtgctgctgcggagatgcgccaacgagctgtatagaaggcccgagagacagcccagaatcgagcagctggttaagcagggctttctgcatctgctggtggacgacgtgctgttctaccagcggcctctgaagtccaagaagtccgagatcgccgattgtcccttcgagcagtaccactacgtgaacaggtctaccggcgagtgtgtggacgagcctgtgaagtgtatccccaagtctcaccctctgttccaagagtaccggctgtggcagttcatccacaacctgcggatctaccagaaagaggccgaagtcaacggccggatggtcctgaactacgacgtgaccgaccacttcctgccaaaccacgaagtgcggtgccagctgttcgactacctgaatgagcgggccgacgtgaaagaatctgtgctgctgaagttcaagcccttcggcctgagcaagaaggccgacctggaacggtacagatggaactaccccagcgagaacacatacccctgcaacaagaccctgtacacaatccccaaggactaccggcggtacttcaaccagaagctgtggcacatcctgtactccgtgtctgaccccgagcagatcgtgaaggctctgagaagctttgccacagagcatcagatccccgacaccgatgcctttgtggcctctctgacaagcgtggtgttcagcgagaaggactacggcagcttctccgagaaggcactgaagaaactgctgcccctgatgagatgcggctccagatggcagagcagcgccattgatgaggccacacaagagcgcatccagcactttctgcacgagcccagccacgaggatttttccgatagcgttagaaaggccctggccaactgccactgcatcgaggatttccagggcctgcctgtgtaccaggcctgttatgccgtgtacggcagacactctgaagccgccgatctgacagcctggaagtctccagatgagctggcctacttcctgcggtacaccttcaagcagcactccctgagaaaccccgtggtggaaaggatcgtgctggaaaccctgagaatcgtggaagatctgtggcggaagtacggcaagatggatgagattcacgtggaaatgggccgcaacctgaagcagaacgccgaggggagaaagcgggactacgaccggaatcaagagaaccaggccgccaactacagagccagaaggctgctgcaagagttcgccagatacgagacagacatcgagaacctgcggcctcacagcccttaccagcaggacctgtttcggctgtacgaggaagaggtgctgggcaactacgccgacgaagtgaagaaggataagcagatcgccaagaccatccagagcctgggcagacccctggaagcttgtaaagtgacagccagcgaggtgcaccggtacagactgtggctggatcagaagtgcaagagcccttacaccggccagcctattagcctggccagactgttcaccagagactacgagatcgagcacgtgatccccaagacacggtactacaacgacagcatgaacaacaaagtgatctgcgaagccgaagtgaacaaagacaagggcaacatgaccggctacgagtatatcctgcagcgcggaggatctatcgtgcagggcgcctttggcaagaccttcaccatcctgaagcgggaagagtacgaggactacatcaacctgcacttcaagcacaaccgggccaagaaagccaacctgctgatggaagatgtgcccgccgagtttagcgagcggatgctgaatgatacccggtacatgagcagagtggtgctgagcctgctgagcaaggtcgtgcgggatgatgatgaggtgtccagcgtgtccaaacacgtgctgcctaccaacggcagcatcaccaccagactgaagtccgactggggcatcaacgacgtgtggaacgatctgatcgcccctcggttccagcggatgaacgagagaatgcacacagacgccttcggcgagatgagaaacgagtccggcaagcggttcttccagcctagactgcctctggacatccctcagatcgacaagaagcggatcgaccacagacaccacgccatggatgccatcgtgatcgcctgcacaacccggaaccacatcacctacctgaactctgtgtctagccacgacggcgacaacgccacaagaatcgacctgaggaccaagctgtgcctgaaacaccacaccgacgccaacggcaactaccagtggctgttcaagaagccctgggacagcttcacacaggatgttcgggccgctctgagcaacatcgtggtgtcctttaagcagaacctgaggattctgaccagcagcaagaaaggcggcagcagcattcggaagcccctgcacaaagagacattcagcggcaaggtgctgctccagcaagtgaaaaccatcagcctgaaggacgccctggccgattggcaccagatcaaggataagaccctgcggcaagagatcaagaggctgctggctgaggtgtaccctgccggaaatgtgtcccagctgatcaagcactttaagctgcagaagaacctgttcaacggcaaggacatccggaaggtggaagtgtacacatacagccagggcgaagagacacaggtggccaataggaagctgctggacaagacactgaccctgaaacagatcgagagcatcaccgatagcggcatcagaaagatcctgatgcggcacctggccaattaccaggatgccgccggaaagtaccggaccgaggaagcttttagtcctgaaggcctggccgagatgaacgcccacattagagagctgaacgacggcaagcctcaccagccagtgtacaaggccagattttccgagatccagggccagaaatttgccgtgggacagagcggagccaaggccaaacagttcgtggaagccgccaagggcaccaacctgttctttgccatctacgccaacaaagacggcaagaggtcctacgagacaatcccactgcaggatgtgatcgccagacggaagcggaaagaagaggtggccccttctgtgaacgagcacggcgagagactgctgtttacactgtctcccggcgacctggtgtacctgcctattgaagaaggcgtggtccctcaggtgctggataagaagagaatctacaaggtcgtcagcttcagcaagcggcagtgcttcttcgtgccccagagcttctccaccacactgtacgataagtgcgagtggggctccatgaacaaaatggaactgaccgacaacaaagagaacatcaaggccctgtgcgtgaagctgaaagtgaaccggctgggcgagatcatcgagattatcgacggacagggatcc

SEQ ID NO: 210 - DNA, 4335 bp, Artificial Sequence
  OMNI nuclease sequence
ggtaccaagaccatcctgggactcgatctcggccctggatctattggatgggccctcgtgaacgtggaaaacggcaagcccaagagcatcatcaaggccggcagcagaatcatccctatggatgccggcgagatgagcgactacgagtctggaaaactgcagagcagcgccagcgtgcggacagcctttagaggcatgagaaggctgtacgagcgggctgccctgagaagagaaagactgctgagagtgctgaacgtgctgggcttcctgcctcagcactaccgggatcagatcgattttggcgagcaccccggcaagttcaagaatcacggcgagcctctgctgccctacagaaagaatgaggccggcaagagcgagtttatcttccagcctagcttcctggaaatgctcgaggacttcaagaagaacaaccctcaggtcctggacgacggcagactgatccctagagactggaccctgtactactgccggaagaaggccctggacagagagatcagcagagaggaactggcctggattctgctcaacgccaacagcaagagaggctactaccagctggacgaggaaaagaccgagaagtccaacgccgagaaagagtatcggagagccaaggtgctggacgtggaacgcctggaagaggacagaaagcagaagggcttctacttctacaagatcacctacgacggcggcctgacacagaccagaaagtgcaagatgcagccttggagagtgggcgacgaggtggacctgatcatcaccacacctctggacaagaatggcaagcctaagaaggacgaggacggcggcatcagacagaccctgtctagccccaaagaggacgattggggcctcgtgatgcagaaaacacaggccggcatcgaccacagcaattgcacagtgggcgagtacatctacaacagcctgctggaaaaccccagcgagaaagtccgcggaggcatcgtgaaaaccatcgagcggcactactacatggaagaactgcggaagatcctggaaagccaggccagattcatccccgagctgtgcgatcacgagctgtacatgaagtgcgtgcgggaactgtaccggaacaacgaagcccacgtgaacgagctgaagcggggcaatatcgtggacttcctgatcaaggacgtgatctactatcagcggcccctgaagtccaagaagtcctgtatcgccgactgtccctacgagagctacacctacgtggacaaagagacaggcgagatcaagaaacggcctctgaaagtgatgcccaagtctcaccctctgttccaagagttccggctgtggcagttcatccggaacatccggatcaccgagaacgagaagatcgtggacggcagaaagtacttcggctacgacgtgacagccaagtacctgggcacacccgaggatgtgtgcagactgtatgagaagctgtccggctacgagaatatcgccgagagcatcgtgctgaagtccctgggcctgaacgccaagatgttcaagtggaactacggcagcaagaaagagttccccggcctgaaaacccaccacgagtttgccacacggatcgccaagctggaaaaggccagagagctgacccagaaagaagagtacaagctctggcacatcctgtacagcgtgtccgaccgggacgaactggaaaaagccctgaagcacttcgccgaggaatgcggctttgacggccagtccttctacgagaagtttaagaccgtgcctaacatgcggggcgactacgcctcttatagcgagagagctgtgaagcggctgctgcagctgatgagatccggcaagtactggaacgagaaagaaatcgacgaggccacactgaagcggatcaacgccatcatcgagtacggctacagcccctacgaagagttcagcgagttcaagagagtggacgacttccagtacctgcagctgtccgatgcctgttacgtggtgtacggcagacacagcgagaacgccgacaacagcgtgtggaacagccccgaagagatcgatgagtacatcggcggcgagttccggaagaacagcatgagaaaccccgtggtggaaaaggtggtggccgagacactgaaggtcgtgcgggacatttggaaaacctacggaaagcccgccgagattcacgtcgagatggccagaagcctgaaggaccccaacgacaagagaaaagaggccaccgagagaatggccgccaaccggaaagagacaatcgacgtccgggaaaagctgcaagagctgaaggatgagcacaaggccgacaatatcaaccccaactccttcatccacatcctgaagtataagctgtggaaagagcaaggcggacagagcccttacaccggcaagtccatctctatcgccaggctgttcaccgacgagtaccaggtggaccacatcatccctcagaagcggtactacgacgacagcttcaccaacaaagaagtgtgcgagagcgccgtgaacctggataagggcgctagactggcctacgagtatatcctggccgaaggcggcaaagaaatcaacgtgaccatcaacgggaagcacgaaaagatcgccatcctgcctaaagaacagtacgaggaatgggtcaagaagcactgcgtcagagagaacggcatcggccggaagggcaagaacctgatgatgacagatgtgcccgccagcttcaacgccagccagctgaacaacacccggtatatcgccagaaagaccgccgaaatcctgagccacatcgttagagagggcagcgatcctggggccagatccaagaatatcatcatgaccaacggcagcatcaccgaccggctgaagaaggattggggactgaagcagatctggaacgaactgatgcagcccagattcgagcggctgaacgataagacccagagcaacgattacggcgaggacgtggtggatgcccacggcaggcactactttcagacaaaggttcccgaaggcctggccgagaagttcgacatcaagagaatcgatcaccggcaccacgccatggacgccatcgtgattgcctgtaccagcctgaaccacatcaactacatgaacaacctgagcggcggagagaaagagagatacgacctgagaagggtgctgtgcgagaaggacagcagagccttcctgaagccttgggagacattcacccaggacagccgcgaggccatgaacaatatcgtcgtgtccttcaagcagaacctgcggatcgtgtcccgggccagcaattactacagccactatgtggatggcaagaagatcatcgagagacagaccaagggcgagcacttcagcatcagaaagcccctgcacaaagccacctattctggactcgtgcggctgccttacacaaagatggaaaagattgagaacaccatcgacaaccccgagcagatcgtcgataagagcatccgcaagggcctgaaagaaattctggtgcagtacaacggcgctgccgacaagaagaagattaagaagtatttcaaggaccgggactacaagctgaatggcgtggacgtggcaaaggtggaagtgcggattgtgcctgaacaggccggacactctgcccatagaaccgtgctggggagcatcaccaatcggaagcagctggacagcatcacagacagcggcatcaagaaaatcctgctgaaccacctggaaaattacggcggcaactacgaggaagctttcagccctgagggcatcagctccctgaacgacaacatcaggcagctgaacggcggcagagatcacaagcccgtgaaatgtgtgcgggtgtccgagaaattcagcctgaagtttcctgtgggccagtccggctccaagatcaagacatacgtggaaaccgagaagggcaccaacctgttcttcgccatctacgtcgacgaagagggcaccagagtgttcgagacaatcccactgaacgtggtggtggaacggaagaaagaccatctgccagccgtgcctgagtgcaatgagaagggcgacaagctgctgttcagcctgtctcctggcgatctggtgtatgtgcctgaggaaggcgagcacattgccatgcctctggaccccaagtgcatctataagatggtgtccgccaactccggcgtgtgctacttcgtgcctcagaacgtggccacacctatcgccgataagatcgagttcggaatcaagaacaagtccgagcgggacctgaacggcaaccagatcaaaaaagtctgcctgaagctcgagacagatcggctgggcaacatcatcaaaatcacaggcaacgacggatcc

SEQ ID NO: 211 - DNA, 4335 bp, Artificial Sequence
  OMNI nuclease sequence
ggtaccaagaccatcctgggactcgatctcggccctggatctattggatgggccctcgtgaacgtggaaaacggcaagcccaagagcatcatcaaggccggcagcagaatcatccctatggatgccggcgagatgagcgactacgagtctggaaaactgcagagcagcgccagcgtgcggacagcctttagaggcatgagaaggctgtacgagcgggctgccctgagaagagaaagactgctgagagtgctgaacgtgctgggcttcctgcctcagcactaccgggatcagatcgattttggcgagcaccccggcaagttcaagaatcacggcgagcctctgctgccctacagaaagaatgaggccggcaagagcgagtttatcttccagcctagcttcctggaaatgctcgaggacttcaagaagaacaaccctcaggtcctggacgacggcagactgatccctagagactggaccctgtactactgccggaagaaggccctggacagagagatcagcagagaggaactggcctggattctgctcaacgccaacagcaagagaggctactaccagctggacgaggaaaagaccgagaagtccaacgccgagaaagagtatcggagagccaaggtgctggacgtggaacgcctggaagaggacagaaagcagaagggcttctacttctacaagatcacctacgacggcggcctgacacagaccagaaagtgcaagatgcagccttggagagtgggcgacgaggtggacctgatcatcaccacacctctggacaagaatggcaagcctaagaaggacgaggacggcggcatcagacagaccctgtctagccccaaagaggacgattggggcctcgtgatgcagaaaacacaggccggcatcgaccacagcaattgcacagtgggcgagtacatctacaacagcctgctggaaaaccccagcgagaaagtccgcggaggcatcgtgaaaaccatcgagcggcactactacatggaagaactgcggaagatcctggaaagccaggccagattcatccccgagctgtgcgatcacgagctgtacatgaagtgcgtgcgggaactgtaccggaacaacgaagcccacgtgaacgagctgaagcggggcaatatcgtggacttcctgatcaaggacgtgatctactatcagcggcccctgaagtccaagaagtcctgtatcgccgactgtccctacgagagctacacctacgtggacaaagagacaggcgagatcaagaaacggcctctgaaagtgatgcccaagtctcaccctctgttccaagagttccggctgtggcagttcatccggaacatccggatcaccgagaacgagaagatcgtggacggcagaaagtacttcggctacgacgtgacagccaagtacctgggcacacccgaggatgtgtgcagactgtatgagaagctgtccggctacgagaatatcgccgagagcatcgtgctgaagtccctgggcctgaacgccaagatgttcaagtggaactacggcagcaagaaagagttccccggcctgaaaacccaccacgagtttgccacacggatcgccaagctggaaaaggccagagagctgacccagaaagaagagtacaagctctggcacatcctgtacagcgtgtccgaccgggacgaactggaaaaagccctgaagcacttcgccgaggaatgcggctttgacggccagtccttctacgagaagtttaagaccgtgcctaacatgcggggcgactacgcctcttatagcgagagagctgtgaagcggctgctgcagctgatgagatccggcaagtactggaacgagaaagaaatcgacgaggccacactgaagcggatcaacgccatcatcgagtacggctacagcccctacgaagagttcagcgagttcaagagagtggacgacttccagtacctgcagctgtccgatgcctgttacgtggtgtacggcagacacagcgagaacgccgacaacagcgtgtggaacagccccgaagagatcgatgagtacatcggcggcgagttccggaagaacagcatgagaaaccccgtggtggaaaaggtggtggccgagacactgaaggtcgtgcgggacatttggaaaacctacggaaagcccgccgagattcacgtcgagatggccagaagcctgaaggaccccaacgacaagagaaaagaggccaccgagagaatggccgccaaccggaaagagacaatcgacgtccgggaaaagctgcaagagctgaaggatgagcacaaggccgacaatatcaaccccaactccttcatccacatcctgaagtataagctgtggaaagagcaaggcggacagagcccttacaccggcaagtccatctctatcgccaggctgttcaccgacgagtaccaggtggaccacatcatccctcagaagcggtactacgacgacagcttcaccaacaaagaagtgtgcgagagcgccgtgaacctggataagggcgctagactggcctacgagtatatcctggccgaaggcggcaaagaaatcaacgtgaccatcaacgggaagcacgaaaagatcgccatcctgcctaaagaacagtacgaggaatgggtcaagaagcactgcgtcagagagaacggcatcggccggaagggcaagaacctgatgatgacagatgtgcccgccagcttcaacgccagccagctgaacaacacccggtatatcgccagaaagaccgccgaaatcctgagccacatcgttagagagggcagcgatcctggggccagatccaagaatatcatcatgaccaacggcagcatcaccgaccggctgaagaaggattggggactgaagcagatctggaacgaactgatgcagcccagattcgagcggctgaacgataagacccagagcaacgattacggcgaggacgtggtggatgcccacggcaggcactactttcagacaaaggttcccgaaggcctggccgagaagttcgacatcaagagaatcgatcaccggcaccacgccatggacgccatcgtgattgcctgtaccagcctgaaccacatcaactacatgaacaacctgagcggcggagagaaagagagatacgacctgagaagggtgctgtgcgagaaggacagcagagccttcctgaagccttgggagacattcacccaggacagccgcgaggccatgaacaatatcgtcgtgtccttcaagcagaacctgcggatcgtgtcccgggccagcaattactacagccactatgtggatggcaagaagatcatcgagagacagaccaagggcgagcacttcagcatcagaaagcccctgcacaaagccacctattctggactcgtgcggctgccttacacaaagatggaaaagattgagaacaccatcgacaaccccgagcagatcgtcgataagagcatccgcaagggcctgaaagaaattctggtgcagtacaacggcgctgccgacaagaagaagattaagaagtatttcaaggaccgggactacaagctgaatggcgtggacgtggcaaaggtggaagtgcggattgtgcctgaacaggccggacactctgcccatagaaccgtgctggggagcatcaccaatcggaagcagctggacagcatcacagacagcggcatcaagaaaatcctgctgaaccacctggaaaattacggcggcaactacgaggaagctttcagccctgagggcatcagctccctgaacgacaacatcaggcagctgaacggcggcagagatcacaagcccattaagtgtgtgcgggtgtccgagactttcaccaccaagtttccagtgggccagaccgccagcaagaccaagtcttacgtggaaaccgagaagggcaccaacctgttcttcgccatctacgtcgacgaggaacggaagcggaccttcgagacaatcccactgaatgtggtggtcgagcgcaagaagcagcatctgctggccgtgcctgagcacaacgagaatggcgacaagctgctgttcagcctgtctcctggcgatctggtgtatgtgcctgaggaaggcgagcacattgccatgcctctggctcccaagcggatctataagatggtgtctagcggcaagggccagtgcttcttcatcccacaaaacattgccgctccgatcatcaacaacaccgagctgggcagcaacaacaagtccgagaacagctgggacaaccggcagatcaagagcgtgtgtctgaaactggaaacagaccggctgggcaacatcattaagatcaccggaaacgacggatcc

SEQ ID NO: 212 - DNA, 4335 bp, Artificial Sequence
  OMNI nuclease sequence
ggtaccaagaccgtgctgggactcgatctcggccctggatctattggatgggccctcgtgaacaccgagaacggcatgcctgagtctatcatcaaggccggcagccggatcattcctatggatgccggcgagatgagcgactacgagtctggaaaactgcagagcagcgccagcgtgcggacagcctttagaggcatgagaaggctgtacgagcgggctgccctgagaagagaaagactgctgagagtgctgaacgtgctgggcttcctgcctcagcactaccgggaccagatcgactttgatctgcaccccggcaagttcaaggatcacggcgaacctctgctgccctacagaaagaatgaggccggcaagagcgagtttatcttccagcctagcttcctggaaatgctcgaggacttccggcggaacaaccctcaagttctggaaggcggcagactgatccccagagactggaccctgtactactgcagaaagaaggccctggacagagagatcagcagagaggaactggcctggattctgctgaacgccaacagcaagagaggctactaccagctggacgaggaaaacgccgagaagtccaatgccgagaaagagtatcggagagccaaggtcgtgggcgtcgaaagactggaagaggatcggaagcagaagggcttctacttctacaagatcacctacgaaggcggcctgacacagacccggaagtgcaaaatgcagccttggagagtgggcgacgaggtggacctgatcatcaccacacctctggacaagaacggcaagcccaagaaggatgagaacggcgagatcaagaaaaccattcggagccccaaagaggacgactggggcctcgttatgcagaaaacacaggccggcatcgaccacggcaatggcacagtgggcgagtacatctacaacagcctgctggaaaaccccagcgagaaagtgaaaggcggcatcgtgaaaaccatcgagcggcactactacaaggacgagctgcggaagatcctggaagctcagagcagattcatccccgagctgcaggaccacggcctgtacattaagtgcgtgaaagagctgtaccacaacaacgagagccacgccaacgagctgagacaccggaacatcatcgactttctgatcaacgacgtgatctactatcagcggcccctgaagtccaagaaaagctgcgtggccgactgtccctacgagagctacacctacgtggacaaagagacaggggagatcaaaaagcggcctctgaaagtgatgcccaagtctcaccctctgttccaagagttccggctgtggcagttcatccggaacctgagagtgaccgagaatgagaagatcgtggacgagcggcggttcttcggctacgatgtgacagccaagtacatcggcacccctgaggacgtgtgcagactgtatgagaagctgagcggctacgccgacatcagcgagtctaaagtgctgaaagccctgggcctgaatgccaagatgttcaagtggaactacggcagcaagaaagagttccccggcctgaaaacccaccacgagtttgcctctcggatcgccaagctggaaaatgccagagagctgacccaaaaagaagagtacaagctctggcacatcctgtacagcgtgtccgaccgggacgaactggaaaaggccctgaagcactttgccgaggaatgcgagttcaaccctcagaacttctacgagcagttcaaggccgctcctaagatgagaggcgactacgccagctactctgagagagccgttagaaggctgctgcccctgatgagaaccggcaagtactgggacgagaaagaaatcgacgccgccacactgaagcggatcaacgccatcattgccgacggctacaacccctgcgaggatttccctgagttcaagcgcgtgggcgacttccagaatctgcagctgtctgatgcctgctacgtggtgtacggcagacacagcgagaacgccgacaatagcgtgtggacaagccccgaagagatcgacgagtacctgtgcggcgagttccggaagaacagcatgagaaaccccgtggtggaaaaagtggtggccgagacactgaaggtcgtgcgggacatttggaaaacctatggcaagcccgccgagattcacgtggaaatggccagaagcctgaaggaccccaacgacaagagaaaagaggccaccgagagaatggccgccaacagaaaggataccatcggcgtgcgcgagaagctgcaagagctgaaggatggccacaaggccgacaacgtgaaccccaactctagcatccacatcctgaagtataagctgtgggaagaacaaggcggactgagcccctacacaggcaagagaatctctatcgcccggctgttcaccgacgagtatcagatcgaccacatcatccctcagaagcggtactacgacgacagcttcaccaacaaggttgtgtgcgagagcaccgtgaacctggataagggcgccagactggcctacgagtatattctggccgaaggcggaaaagaaatcagcgtgaccgtgaatggcaagcacgagcggaccatcatcttccccaaagaacagtacgaggaatgggtcaagaaaaactacatgaaggaaggcgtcgtcggccggaagggcaagaatctgatgatgacagatgtgcccgccagcttcaacgccagccagctgaacaacacccggtatatcgccagaaagacagccgagatcctgagcagaatcgtgcggggcgaaaacgatcagggcgctagaagcaagaatatcatcatgaccaacggcagcatcaccgaccggctgaagaaggattggggcctgaagcagatctggtctaagctgatgcagcccagattcgagcggctgaacgataagacccagagcaacgactacggcgaggaagtgaccgacagcaacggcagaagatacttccagaccagagtgcccgaagaactggccgagaaattcgacatcaagcggatcgatcaccggcaccacgccatggatgccatcgtgatcgcttgtaccagcctgagccacatcaattacatgaacaacctgagcggcggagagaaagagcggcacgatcttagaagagtgctgtgcgagaaggacagcagagccttcctgaagccttgggagacattcacccaggactcccgggaagccctgaacaatatcatcgtgtccttcaagcagaacctgcggatcgtgtcccgggccagcaactactacagacactatgtggacggcaagaaagtgacagagaggcagaccaagggcgagcacttcagcaatagaaagcccctgcacaagctgacctactctggactcgtgcggctgccttacaccaagatggaaaagatcgagaacaccatcgacaaccccgagcagattgtggataagagcatcagaaagggcctgaaagaggtgctggcccagtacaatggcagcgccgacaagaagaagattaagaagtactttaaggaccgggactacaagctgaacggcgtgtacgtggcaaaggtggaagtgcggattgtgcctgagcaggccagacactctgctagaagaactgccctgggactgatcaagaaccggaagcagctggactccatcaccgataccggcatcaaaaagatcctgctgaaccacctggaaaattacggcggcaactacgaggaagctttcagccctgagggcatcagcagcctgaacgacaacatcaggcagctgaatggcggcagagatcacaagcccgtgaaatgtgtgcgggtgtccgagaagttctccctgaagttcagcgtgggccagaactgctccaagatcaagacatacgtggaagccgccgacaacaccaacctgttcttcgccatctatgtggatgaggaaggcaagcgggccttcgagacaatccctctgaatgtggtggtggaacggaagaggcagcacctgtctgctgtgcccgagcacaatgacaaagaaaacaagctcctgttcagcctgtctcctggcgatctggtgtatgtgcctgaagagggcgaacacattgccatgcctctggactacgagcggatctataagatgcagagcaccgactccaacaagtgcttcttcgtgcctcagtacgtggccgccagaatcgccgataagatcgagtacggccccaagaacaagtccgagagggacctgaacggcaatcaaatcaagaaagtctgcctgaagctcgagacagaccggctgggcaacatcatcaagatcacaggcaacgacggatcc

SEQ ID NO: 213 - DNA, 4335 bp, Artificial Sequence
  OMNI nuclease sequence
ggtaccaagaccatcctgggactcgatctcggccctggatctattggatgggccctcgtgaacaccgagaacggcaagcctgagtctatcatcaaggccggcagccggatcattcctatggatgccggcgagatgagcgactacgagtctggaaaactgcagagcagcgccagcgtgcggacagcctttagaggcatgagaaggctgtacgagcgggctgccctgagaagagaaagactgctgagagtgctgaacgtgctgggcttcctgcctcagcactaccgggaccagatcgactttgatgagcacaccggcaagttcaagaaccacggcgagcctctgctgccctacagaaagaatgagacaggcaagagcgagtttatcttccagcagagcttcctggaaatgctcgaggactttatgaagaacaaccctcaggtgctggaaggcggcagactgatccctagagactggaccctgtactactgccggaagaaggccctggacagagagatttctagaggcgagctggcctggattctgctgaacgccaatagcaagcggggctactaccagctggacgaggaaaagaccgagaagtccaacgccgagaaagagtatcggagagccaaggtggtgtccgtggaaaagcaggacgaggacagaaagcagaagggctacttcttctacaagatcacctacgaaggcggcctgacacagacccggaagtgcaaaatgcagccttggagagtgggcgactacgtggacctggtcatcaccacacctctggacaacaatggcaagcccaagaaggatgaggacggcgagatcagaaagaccctgagcagccccaaagaggacgattggggcctcgtgatgcagaaaacacaggccggcatcgatcacggcaatggcacagtgggcgagtacatctacaacagcctgctggaaaaccccagcgagaaagtgaaaggcggcatcgtgaaaaccatcgagcggcactactacaaggacgagctgcggaagatcctcgaggcccagtctagattcatccccgagctgcaggaccacggcctgtacattaagtgcgtgaaagagctgtaccacaacaacgagagccacgccaacgagctgagacaccggaacatcatcgattttctgatcaacgacgtgatctactatcagcggcccctgaagtccaagaaaagctgcgtggccgactgtccctacgagagctacacatacgtggacaaagagacaggggagatcaagaaacggcctctgaaagtgatgcccaagtctcaccctctgttccaagagttccggctgtggcagttcatccggaacctgagagtgaccgagaatgagaagatcgtggacgagcggcggttcttcggctacgatgtgacagccaagtacatcggcacccctgaggacgtgtgcagactgtatgagaagctgagcggctacgccgacatcagcgagtctaaagtgctgaaagccctgggcctgaatgccaagatgttcaagtggaactacggcagcaagaaagagttccccggcctgaaaacccaccacgagtttgccagcaggatcgccaagctggaaaatgccagagagctgacccagaaagaagagtacaagctctggcacatcctgtacagcgtgtccgaccgggacgaactggaaaaagccctgaagcacttcgccgaggaatgcgagttcaatccccagaacttctacgagcagttcaaggccgctcctaagatgagaggcgattacgccagctactctgagagagctgttcggagactgctgcccctgatgagaaccggaaagtactgggacgagaaagaaatcgacgccgccacactgaagcggatcaacgccatcattgccgacggctacaacccctgcgaggacttccctgagttcaagcgcgtgggcgatttccagaatctgcagctgtccgatgcctgctacgtggtgtatggcagacacagcgagaacgccgacaactccgtgtggacaagccccgaagagatcgatgagtacctgtgcggcgagttccggaagaacagcatgagaaaccccgtggtggaaaaagtggtggccgagacactgaaggtcgtgcgggatgtgtggaaaacctacggaaagcctgccgagattcacgtggaaatggccagaagcctgaaggaccccaacgacaagagaaaagaggccaccgagcggatggccgagaacagacgggatacaatcgacgtgcgcgagaagctgcaagagctgaaggatggccacaaggccgacaacgtgaaccccaacagcagcatccacatcctgaagtataagctgtggaaagagcaaggcggacagagcccctataccggcaagagcatctctatcgccagactgttcaccgacgagtaccaggtggaccacatcatccctcagaagcggtactacgacgacagcttcaccaacaaggtcgtgtgcgagagcgccgtgaatctggataagggcgctagactggcctacggctatattctggccgaaggcggaaaagaaattgacgtgaccgtgaacgggaagcgcgagaaaaccgccatctttcccaaagaacagtacgaggaatgggtcaagaagcactgcgtcagagagaatggcatcggccggaagggcaagaatctgatgatgaccgatgtgcccgccagcttcaatgccagccagctgaacaacacccggtacattgccagaaagacagccgagatcctgagccacatcgttagagagggaagcgatcccggcgctcggagcaagaatatcatcatgaccaacggctccatcaccgaccggctgaagaaggattggggactgaagcagatttggagcgagctgatgcagcccagattcgagcggctgaacgataagacccagagcaacgactacggcgaggaaatcaccgacagcaacggcaagagatacttccagaccagagtgcctgaggtgctggccgaaaagttcgacatcaagcggatcgaccaccggcaccacgccatggatgccatcgtgatcgcttgtaccagcctgagccatatcaactacatgaacaacctgagcggcggagagaaagagagatacgacctgagaagggtgctgtgcgagaaggacagcagagcctttctgaagccttgggagacattcacccaggactccagagaggccctgaacagcatcatcgtgtccttcagacagaacctgcggatcgtgtcccgggccagcaattactacaaccactatgtggacggcaagaaagtgacagagaggcagaccaagggcgagcacttcagcatcagaaagccactgcacaaggccacctactctggactcgtcagactgcccgagacaaagatggaaaagattgagaacaccatcgacaaccccgagcagatcgtcgacaagagcattcggaagggcctgaaagaagtgctggcccagtataacggcaccgccgacaagaagaagatcaaaaagtacttcaaggaccgggactacaagctgaacggcgtggacgtgtccaaagtgaagatcagatttgtgcccgagcaggccagacactctgcccatagaaccgctctgggcagcattaccaacaagaagcagctggacagcatcaccgatagcggcatccggaaaatcctgctgaaccacctggaaaattacggcggcaactacgaggaagctttcagccctgagggcatcagcagcctgaacgacaacatcagacagctgaatggcggcagagatcacaagcccgtgaaatgtgtgcgggtgtccgagaagttctccctgaagttcagcgtgggccagaactgctccaagatcaagacctacgtggaagccgccgataacaccaacctgttcttcgccatctatgtcgacgaggaaggcaagcgggccttcgagacaatccctctgaatgtggtggtggaacggaagaggcagcatctgtctgccgtgcctgagcacaatgacaaagaaaacaagctgctgttctcactgagccctggcgatctggtgtatgtgcccgaagagggcgaacacattgccatgcctctggactacgagcggatctataagatgcagagcaccgactccaacaagtgctttttcgtgccccagtacgtggccgccagaatcgccgataagatcgagtacggccccaagaacaagtccgagagggacctgaacggcaaccagattaagaaagtgtgcctgaagctcgagatcgacagactgggcaacatcatcaagatcacaggcaacgacggatcc

SEQ ID NO: 214 - DNA, 3750 bp, Artificial Sequence
  OMNI nuclease sequence
ggtaccaaggtgctgggactcgatctcggcgttggctctgttggatggtgtctgatcgaggtggacggcaagtacaaccccatcgagatcctcggcatgggcagcagaatcctgagcctgacacctgacgagagcagcaacttcgacagaggcaatggcgagagcgtgtgcgcccagcggacttttagaagaaccgccagaaagatgctgtgccggtacaagatgcggcggagactgcttagatcccagctggcctttctgggcatgctggatagcgccgatagcctgaatagcctgtctcctctggaactgtggaagctgagatctgatgccgctacatctggcgtgcggctgacactgcctgagattggaagagtgctgctgcacctgaaccagaagagaggctacaagcacgccaagaccgatgtggccgatgccaagcagaccgagttcgtgcaggacgtgaaccggaactatgccgagatcagagccgagggcaagacctacggccagcacttttatgagagactgctggccaccgccgccacaacagataagggtgccaaagtggccaccttccggatcagagaaaacgtgttcccaagacaggcctacgaggacgagttcgacaccatcatgcgggtgcagagaaagttctaccccgagatcctgaccgacgaagtgatcgccggactgcggaacgccatctttttccagcggcctctgaagtcctgcaagcacctggtgtctgtgtgcgagttcgagggaaagaactactgcaccgccgacggcagagaagtgtttggcggacctaaagtggcccctagaacaagccctctggctcaagtgtgccggctgtatgaagtgatcaacaacatccggctggtcaacgtgcggaacaaggacgccgctcctattcctgatggcatcgtgtctagcgaggcccggaagtcccagtaccagtttgtgttcaccgccgaggaaagagagcggatctacgagttcctgaacacccacgagaagatgaccgtgaccgacctgctgaagctgatcggccttaagagaggcgacggcttcagacctgatcagtctctcggaaagggcatccccggcaacaagacatacacagccctgttcaatgccctggaaggcgtgggcagaagagatgagctgctgcggttcaacctgagattcatcgacggcaatgccgatagcgctacaggcgacgtgcgaagagtggtgtcccctgacttcatcaacgagcccctgtacagactgtggcacacagcctactctatcgccgatagggatgaactggccgctgctctggccaagaacttcggaattacagaccccgccgtggtggacagaatcttcgccattgatttcaccggcgctggcttcagcaacagatccgcacggtttatgcggagaatcatcccctacctggccgaaggcatggtgtattctgatgctgcagctgccgctggcgtgaaccattctgcatctgtgaccgccgaagagaacgccaccagagtggtggtggaccacctggacatcatcaagaagggcagcctgagacagcccgtgatcgagaagatcctgaatcagatgatccacgtggtcaacagcctgatcgcccagttcggccctatcgatgaagtgcgcgtggaactggccagaagcctgaagcagagcgccaaagaaagatccgatgccagcaccgccatcaacgccagagagaaagagaacaaggccctgggagagaagatcgccgagtacggactgacccctagcagacggaccatccagaaactgcggctgtgggaagagacagagcacgtgtgcatgtactgtggccagcctgtgtctgccaccgagtttctgacaggggatgccgaggttgagcacatcatccccagatccattttcttcgacgacagcctgtccaacaagacctgcgcctgcagaagatgcaacaaggccaaaaacaaccggaccgcctacgatttcatgaaggaagatcacaccgacgaggaatttcgggcctatatcgccagagtggaagccatggccgaggctaagaagatcagccggaccaagagggacagactgctgtgccccaaagaggaaatccccagcgacttcctggaacgggatctgcggcagagccagtacattgcccggaaggccatggaaatcctgcacaccgtcgtcagaaatgtgtgggccacaagcggcagcgtgaccgatttctttagacaccagtggggctacgaccggattctgcacgatctgagcctggataagtatgcctctgccggcctggtggaagaggtggaatatgagcacaagggccagacacaccggcggcagcagatcaagaactggtccaagagattcgaccaccggcaccatgccgtggacgctctggttattgctctgaccagacagggctacgtgcagcggctgaacaatctgaatgccgagcacggcaacatccacgccgagctggtcaaagagaatgccgacttcacccggaacaagagccagctggaactctgggccagcaccagacctagattcgacatcgagacagtgcgcaaggccgtggaagggatcgccgtgtcttttaagagcggcaagaagctgaccacacctggcaagagggccatcatgagaggcggcaaaaagaccgtggtgcaggacaagctggttatccctagaggcgccctgcaccaagagacagtgtatggcctgatcagactgcccgatggcagaaagaccctgaagtacgccttcgacacccctactctggtgtcagaccctgccgctagaaaagccatccaggccatcctggaacacttcggcggaaacgtgaagaaggccctgaaatctctgcccggcgaaggcctggaagtgatgagaaaaggcaagcgcgagaacgtgaccgaggtgtcctgccacagattcgagtacgtcgtgcggaagtctgtggccgctctgaagtacaaggacatcctgaagatcgtggatggcgccgtgcgcagaagcgtggaaggcagatttgccgagtgtggcaacaaggacagcgagtaccagaagtccttcgccgagaggccacttatcctgcctggcgcctttacacccatcagaacagtgcggatcgccaccggcctgaagcctaaatctatggccgctgtgcggagagatagcagcggcaatcctatcggctatgccaagacagccagcaaccaccacattgccatctacgaggatagcgtgggaagaaagctgtgctccgtgacctctatgtgggacggcgtgctgagaaggctgaacggaatccctgtgatcgtgaagcaccccgacgatgcctggaacctgctgatgggaattgccgatgaggacgtgcgggaaagactggctgcaagccttcctagacctgactggaagttcctgatgagcctgcagatgaaccagatgttcgtgctgggcctgagcgaggatgagttcaacgacgccgtccggaacaacgatagagccacactggccagccacctgtatagagtgcagaagctggccgacaacgacttcagcctgcggagacacaccaacaccaccgccgatgacaccacagagttccggaagatgctggacgtgtaccggctgagcacccaggcttttctgaatctgaagccccacaaagtgaagatcacccctaccggcgacttcgcctatgacggatcc

SEQ ID NO: 215 - DNA, 3750 bp, Artificial Sequence
  OMNI nuclease sequence
ggtaccaaggtgctgggactcgatctcggcgttggctctgttggatggtgtctgatcgaggtggacggcaagtacaaccccatcgagatcctcggcatgggcagcagaatcctgagcctgacacctgacgagagcagcaacttcgacagaggcaatggcgagagcgtgtgcgcccagcggacttttagaagaaccgccagaaagatgctgtgccggtacaagatgcggcggagactgcttagatcccagctggcctttctgggcatgctggatagcgccgatagcctgaatagcctgtctcctctggaactgtggaagctgagatctgatgccgctacatctggcgtgcggctgacactgcctgagattggaagagtgctgctgcacctgaaccagaagagaggctacaagcacgccaagaccgatgtggccgatgccaagcagacagagtttgtgcagggcgtgaaccggaactatgccgagattagagccgagggcaagacctacggccagcacttttatgagagactgctggccaccgccgccacaacagataagggtgccaaagtggccaccttccggatcagagaaaacgtgttcccaagacaggcctacgaggacgagttcgacaccatcatgcgggtgcagagaaagttctaccccgagatcctgaccgacgaagtgatcgccggactgcggaacgccatctttttccagcggcctctgaagtcctgcaagcacctggtgtctgtgtgcgagttcgagggaaagaactacagaaccgccgacggcagagaagtgtttggcggacctaaagtggcccctagaacaagccctctggctcaagtgtgccggctgtatgaagtgatcaacaacatccggctggtcaacgtgcggaacaaggacgccgctcctattcctgatggcatcgtgtctagcgaggcccggaagtcccagtaccagtttgtgttcaccgccgaggaaagagagcggatctacgagttcctgaacacccacgagaagatgaccgtgaccgacctgctgaagctgatcggccttaagagaggcgacggcttcagacctgatcagtctctcggaaagggcatccccggcaacaagacatacacagccctgttcaatgccctggaaggcgtgcggagaagagatgagctgctgcggttcaacctgagattcatcgacggcaatgccgacagcgccaccggcgatatgagaagagtggtgtcccctgacttcatcaacgagcccctgtacagactgtggcacacagcctactctatcgccgatagggatgaactggccgctgctctggccaagaacttcggaattacagaccccgccgtggtggacagaatcttcgccattgatttcaccggcgctggcttcagcaacagatccgcacggtttatgcggagaatcatcccctacctggccgaaggcatggtgtattctgatgctgcagctgccgctggcgtcaaccattctgcatctgtgaccgccgaagagaacagcaccagagtgctggtggaccacctggacatcatcaagaagggcagcctgagacagcccgtgatcgagaagatcctgaatcagatgatccacgtggtcaacagcctgatcgcccagttcggccctatcgatgaagtgcgcgtggaactggccagaagcctgaagcagagcgccaaagaaagatccgatgccagcaccgccatcaacaccagagagaaagagaacaaggccctgggagagaagatcgccgagtacggactgacccctagcagacggaccatccagaaactgcggctgtgggaagagacagagcacgtgtgcatgtactgtggccagcctgtgtctgccaccgagtttctgacaggcgacgccgaggtggaacacatcatccccagatccattttcttcgacgacagcctgtccaacaagacctgcgcctgcagaagatgcaacaaggccaaaaacaaccggaccgcctacgatttcatgaaggaagatcacaccgacgaggaatttcgggcctatatcgccagagtggaagccatggccgaggccatgaagatcagcaggaccaagagggacagactgctgtgccccaaagaggaaatccccagcgacttcctggaacgggatctgcggcagagccagtacattgcccggaaggccatggaaatcctgcacaccgtcgtcagaaatgtgtgggccacaagcggcagcgtgaccgatttctttagacaccagtggggctacgaccgcatcctgcacgatctgagcctggataagtatgccctggccggcctggtggaagaggtggaatatgagcacaagggccagacacaccggcggcagcagatcaagaactggtccaagagattcgaccaccggcaccatgccgtggacgctctggttattgctctgaccagacagggctacgtgcagcggctgaacaatctgaatgccgagcacggcaacatccacgccgagctggtcaaagagaacgccgacttcacccggaacaagagccagctggaactctgggcctccaccagacctagattcgacatcgagacagtgcgcaaggccgtggaagggatcgccgtgtctttcaagtccgccaagaagctgaccacacctggcaagagggccatcatgagaggcggcaagaaaaccgtggtgcaggacaagctggttatccccagaggcgccctgcatcaagagacagtgtatggcctgatccggctgcctgacggcagaaagacactgaagtacgccttcgacacccctactctggtgtcagaccctgccgctagaaaagccatccaggccatcctggaacacttcggcggaaacgtgaagaaggccctgaaatctctgcccggcgaaggcctggaagtgatgagaaaaggcaagcgcgagaacgtgaccgaggtgtcctgccacagatttgagtacgtcgtgcggaagaacgtggccgctctgaagtacaaggacatcctgaagatcgtggacggcgctgtgcggagatctgtggaaggcagatttgccgagtgtggcaacaaggacagcgagtaccagaagtccttcgccgagaggccacttatcctgcctggcgcctttacacccatcagaacagtgcggatcgccaccggactgaagcctaaatctatggccgcagtgcggagagacagcagcggacatcctatcggatatgccaagacagccagcaaccaccacattgccatctacgaggatagcgtgggcagaaagctgtgctccgtgacctctatgtgggatggggtgctgagaaggctgaacggcatccctgtgatcgtgaagcaccccgacgatgcctggaacctgctgatggacattgccgatgaggacgtgcgggaaagactggctgcaagccttcctagacctgactggaagttcctgatgagcctgcagatgaaccagatgttcgtgctgggcctgagcgaggatgagttcaacgatgccgtccggaacaacgacagagccacactggctgcccacctgtatagagtgcagaagctggccgacaacgacttctttctgcggcggcacaccaacaccaccgccgatgataccacagagttccggaagatgctggacgtgtaccggctgagcacccaggcttttctgaacctgaatcctcacaaagtgaagatcacccctaccggcgacttcgcctatgacggatcc

SEQ ID NO: 216 - DNA, 3750 bp, Artificial Sequence
  OMNI nuclease sequence
ggtaccaaggtgctgggactcgatctcggcgttggctctgttggatggtgtctgatcgaggtggacggcaagtacaaccccatcgagatcctcggcatgggcagcagaatcctgagcctgacacctgacgagagcagcaacttcgacagaggcaatggcgagagcgtgtgcgcccagcggacttttagaagaaccgccagaaagatgctgtgccggtacaagatgcggcggtgtctgcttagatcccagctggcctttctgggcatgctggatagcgccgatagcctgaatagcctgtctcctctggaactgtggaagctgagatctgatgccgccacatctggcgtgggactgacactgcctgagatcggaagagtgctgctgcacctgaaccagaagagaggctacaagcacgccaagaccgatgtggccgatgccaagcagacagagtttgtgcagggcgtgaaccggaactatgccgagattcacgccgagggcaagacctacggccagcacttttatgagagactgctggccaccgccgccacaacagataagggtgccaaagtggccaccttccggatcagagaaaacgtgttcccaagacaggcctacgaggacgagttcgacaccatcatgcgggtgcagagaaagttctaccccgagatcctgaccgacgaagtgatcgccggactgcggaacgccatctttttccagcggcctctgaagtcctgcaagcacctggtgtctgtgtgcgagttcgagggaaagaactacagaaccgccgacggcagagaagtgtttggcggacctaaagtggcccctagaacaagccctctggctcaagtgtgccggctgtatgaagtgatcaacaacatccggctggtcaacgtgcggaacaaggacgccgctcctattcctgatggcatcgtgtctagcgaggcccggaagtcccagtaccagtttgtgttcaccgccgaggaaagagagcggatctacgagttcctgaacacccacgagaagatgaccgtgaccgacctgctgaagctgatcggccttaagagaggcgacggcttcagacctgatcagtctctcggaaagggcatccccggcaacaagacatacacagccctgttcaatgccctggaaggcgtggacagaagggacgagctgctgcggttcaacctgagattcatcgactggaatgccgacagcgccaccggcgatatgagaagagtggtgtcccctgacttcatcaacgagcccctgtacagactgtggcacacagcctactctatcgccgacagagatgaactggccgctgctctggccaagaacttcggaattacagaccccgccgtggtggacaggatcttcgccattgatttcaccggcgctggcttcagcaaccgctctgctcggtttatgcggcggatcatcccatacctgaccgaaggcatggtgtattccgatgctgcagctgccgctggcgttaaccattctgcctctgtgaccgccgaagagaatgccgctagagtgctggtggaccacctggacatcatcaagaagggcagcctgagacagcccgtgatcgagaagattctgaatcagatgatccacgtggtcaacagcctgatcgcccagttcggccctatcgatgaagtgcgcgtggaactggccagaagcctgaagcagagcgccaaagaaagatccgatgccagcaccgccatcaacgccagagagaaagagaacaaggccctgggcgagaagatcgccgagtatggcctgatgccttccagacggaccatccagaaactgcggctgtgggaagagacagagcacgtgtgcatgtactgtggccagcctgtgtctgccaccgagtttctgacaggcgacgccgaggtggaacacatcatccccagatccattttcttcgacgacagcctgtccaacaagacctgcgcctgcagaagatgcaacaaggccaaaaacaaccggaccgcctacgatttcatgaaggaagatcacaccgacgaggaatttcgggcctatatcgccagagtggaagccatggccgaggctaagaagatcagccggaccaagagggacagactgctgtgccccaaagaggaaatccccagcgacttcctggaacgggatctgcggcagagccagtacattgcccggaaggccatggaaatcctgcacaccgtcgtcagaaatgtgtgggccacaagcggcagcgtgaccgatttctttagacaccagtggggctacgaccgcatcctgcacgatctgagcctggataagtatgccctggccggcctggtggaagaggtggaatatgagcacaagggccagacacacagacggcagcagatcaagaactggtccaagagattcgaccaccggcaccatgccgtggacgctctggttattgctctgaccagacagggctacgtgcagcggctgaacaatctgaatgccgagcacggcaacatccacgccgagctggtcaaagagaacgccgacttcacccggaacaagagccagctggaactctgggccagcaccagacctagattcgacatcgagacagtgcgcaaggccgtggaaagaatcgccgtgtccttcaagagcggcaagaagctgacaacacccggcaagagggccatcatgagaggcggcaaaaagaccgtggtgcaggacaagctggttatccctagaggggccctgcaccaagagacagtgtacggcctgatcagactgcccgatggcagaaagaccctgaagtacgccttcgacacccctactctggtgtcagaccctgccgcaagaaaagccatccaggccatcctggaacacttcggcggaaacgtgaagaaggccctgaaatctctgcccggcgaaggcctggaagtgatgagaaaaggcaagcgcgagaacgtgaccgaggtgtcctgccacagatttgagtacgtcgtgcggaagaacgtggccgctctgaagtacaaggacatcctgaagatcgtggatggcgccgtgcggagatccgtggaaggcagatttgccgagtgtggcaacaaggacagcgagtaccagaagtctctggccgagaggccacttatcctgcctggcgcctttacacctatcagaaccgtgcggatcgccaccggactgaagcctaaatctatggccgccgtcagaagagactccagcggcaatcctatcggctacgccaaaaccgccagcaaccaccacattgccatctacgaggatagcgtgggcagaaagctgtgctccgtgacctctatgtgggacggcgtgctgagaaggctgaacggaatccctgtgatcgtgaagcaccccgacgatgcctggaacctgctgatggacattgccgatgaggacgtgcgggaaagactggctgcaagccttcctagacctgactggaagttcctgatgagcctgcagatgaaccagatgttcgtgctgggcctgagcgaggatgagttcaatgacgccgtccggaacaacgacagagccacactggctgcccacctgtatagagtgcagaagctggccgacaacgacttctttctgcggcggcacaccaacaccaccgccgatgataccacagagttccggaagatgctggacgtgtaccggctgagcacccaggcttttctgaacctgaatcctcacaaagtgaagatcacccctaccggcgacttcgcctatgacggatcc

SEQ ID NO: 217 - DNA, 4659 bp, Artificial Sequence
  OMNI nuclease sequence
ggtaccaagaacatcctgggcctcgacctgggcagcaattctatcggatgggccatcgtgaaggccctgaagaacgaggacggcaaagagatcctgcagagcatcgatctggccggcagcagaatcatccccatggatcaggccacactgggcaacttcgagaacggcaatagcgtgtcccagaccagagagagaaccggctacagaagcgccagacggctgagagagagatacctgctgcggcgggaaagactgctgcgggttctgaattgcatgggctttctgcccgagcactacagccagaacatcgataagtacggcaagttcttcctggacaacgaagtgaagctgagctggaagaaagacaagatgggcaagaacgagttcatcttcctcgacagcttcaacgagatgctggaagatttccggcacagccagcctcagctgctgctggatggcagaaaggtgccctacgactggaccatctactacctgcggaagaaagccctgaccgagaagatcagcaaagaggaactggcctggattctgctcaacttcaaccagaagcggggctacttccagctgagaggcgaggatgaagaggtgcagggcaagaagatcgagttctacgccctgaaggtcgtgcgcgtggaagatacaggcgagaagaagggcaaagacacctggtacaacgtgtacctggaaagcggcctgggcgacaccgatgactattgggtttacagacgggccagcagcgtgcccattgatgagtgggagggccaagtgaaagagttcatcgtcaccaccactctggacaacaatggcagccctcagggcgacaaagagggcaaagtcaagagaagcttcagcatccccaagcctgaggactggatgctggtcaagaaaaagaccgaggtggacatcaagagcagcggcaagacagtgggcacctacatctacgacaccctgctgcagaagcccgatcagaagatcaagggcaagctgatccggaccatcgagcgcgagaactacaccaacgagctgagcctgatcctggaaaaccagaagaagttccacctggaactgcaggaccgcgagctgtaccaccagtgtatcgagctgctgtactgcaagaatgaggcccacaagagagtgatcggcacctgggatttcaccagcctgttcatcaaggacatcctgttctaccagcggcctctgaagtccaagaaggctctgatcgacaactgcccctacgaggaaagcttctacatcgagaatggggagaagaagtctaagccccggaagtgtatcgccaagtctcaccctctgttccaagagttccggatctggcagttcatcagcaacctgcggatctaccagaaagtcaaagaggtggacggcaagctgcagttcaacgtggacgtgaccagcgacttcctgagagatgagtctgcctacggcgagctgttcaagtggctgaacgaacgggccgaagtgtcccaagaggatctgctgaaacacctggggctgaagaaaacaaagacagaggataccgtgtctctgtaccggtggaactacgtcgaggacaagaagtaccccggcaacaagaccagaagcagcatcctgaagaagctgctgaacgacgagaaagaggccctgagcgaggacatcgagctgaagatctggcatctgctgtattccgtgtctgcccagagcgagatcgataaggccctgtccagcaagaatgtgtccaccaagggcatctactccggcctgagcgtgtacttcagcgacgagacaatccagaaaatcaagaacgtgaagctggaatccggctacggcagctactctgccaaggccattggaaagctgctccctctgatgcggagaggcaagtactggaacctggaatccatcgacaaccacaccaaagagcggatcgagaagattctgaacggcgagtgcgacgaaaccatccgggccagaaccagagaaaagagcatcagcctgaccgacatcagccagttcaagggactgcctctgtggctggcctgctacatcgtgtacgacagacacagcgagctgaaaaccatcaagaagtggaacggccccgaggatatcgacaagttcctcaaagagtttaagcagcacaccctgcggaaccccatcgtggaacaagtgatcatggaaaccctgcgggtcgtgcgggacatttggagaagagtgggcagcatcgacgagatccacattgagatgggcagagacatgaagcagacagcccaagagagagccagacgcagcgccatcatcagcagaaacgagaacgacaacctgagaatcaaggctctgctgcacgagtttatgaaccccgagctgggaatcgagaacgtgcggccttatagccccgcacagcaagagattctgaggatctacgaggatggcgtgctgagcagcgtgtccgagatcgaggacgagatcaagaatatcctcaagaagttcaacgagtccgaggaaggcaagcggcccaccaaaaacgagatcatccggtacaagtgctggctcgagcagaagtacagaagcccctataccggcgagatcattcccctgggaaagctgtttacccctgcctaccagatcgagcacatcatccctcaggccagattcttcgacgactccttcaccaacaaagtgatctgcgaagccgaagtgaacgccaagaagggcgatctgctgggctacgagttcgtgaaagagaaaggcggcgagattgtggaactgagcggaggcagaaacgtgcggatcttctccgtggaagagtacgaggactttgtgaaagagcactataagagcaacaagcagaagatgcagagactgctggccgaggacattcccaccgagtttagccacagacagctgaacgatagccggtacatcagcaagtacatccggaacctgctgagcaacatcgtcagagaggatgacgagcaagagtccgtgtctaagaatgtgatcagctgcaacggcgccatcaccgacagactgaagaaagattggggcgtgaacgacgtgtggaaccacatcattctgcctagattcgtgcggctggaagagatcagggccgacaatggcgagaagttcaccgccttcaatcaagagggccacagaatccccagcatgcccctgattcaccagaagggcttcaacaagaagagaatcgaccaccggcaccacgccatggatgccattgtgatcgcctgcaccaccagggaccatgtgaacctgctcaacaacgagtgcagcaaccctcagaacaacgtgaacagacaccagctgtcccggaagctgagaagatatgagaacgtgtcctacaagcaggacgggaagctcaaagaaagagaggtgccaaaagagttcctgaagccttgggagggcttcaccagagatgtggaatttgccctgaaaaacgtgatcgtgtccttccggcagaacctgagagtgctgaacaagaccgtgaactactttcagcactggaaggacaacagctctgagaaagagtggaaagagcagaaatccgccgaccactggtccatcagaaagcctctgcaccaagagacagtgctgggcgaagtgtttctgtggcggaccagattcgtgtccctgagagaggctctgaccaagcctaagcggatcgtggaaaaggacctgcggagcaagatcctcgagctgcagagaaagggctacgacatcgagaggatcaagaaatacttcgaggataacaaggacgtgtggcaggacgtgaacctgtccaagatcgaagtgcggtactacagccgcgagatcgtggacccaagaaccggcctgcctaagaacagatacttcgccaccagatttggcaacgacctgatctccctgttcagcggcgtgtccaatttcgagaatgccaagaagattatcaagtccatcacagacaccggcatccagaagatcctgttccggcacctcgagaacaagggaaacgaccctgtgctggctttcagcccagagggcatcgatgagatgaaccggacaatcaagaccctgaacaacggcaaggaccacaagcctatctacaaagtccgcatctacgagtgctccaccatgaagtttccactgggcagcgtgggcaacaagtccaaaaagttcgtggaagccgccaagggcaccaacctgtacttcgccgtgtacgaaaaagaggtcgagaacgatcggggcgagtgccacaaagagcgcgcctttaagacaatccctctgaatgacgtgatccgcaacctgaagcagggcctgtctatcgcccctaacgatgagaatggcaaccctcctgccttcattctgagccccaacgatctggtgtacctgccgacaaaagaagaactggaaaccggcagcatctcccagcctctggacagaaaccggatctacaagatggtgtcctgcaccggcaacgtggcccacttcatccctgcctttatcgctatccctatcctccagacaatcgagctgggctccaagaacaaagcccagaaggcctggaccggggagatgatcaaagagagctgcatccccatcaaggtggaccggctgggcatcctgatcagcatcaatggcagagccgtgggatcc

SEQ ID NO: 218 - DNA, 4659 bp, Artificial Sequence
  OMNI nuclease sequence
ggtaccaagaacatcctgggcctcgacctgggcagcaattctatcggatgggccatcgtgaaggccctgaagaacgaggacggcaaagagatcctgcagagcatcgatctggccggcagcagaatcatccccatggatcaggccacactgggcaacttcgagaacggcaatagcgtgtcccagaccagagagagaaccggctacagaagcgccagacggctgagagagagatacctgctgcggcgggaaagactgctgcgggttctgaattgcatgggctttctgcccgagcactacagccagaacatcgataagtacggcaagttcttcctggacaacgaagtgaagctgagctggaagaaagacaagatgggcaagaacgagttcatcttcctcgacagcttcaacgagatgctggaagatttccggcacagccagcctcagctgctgctggatggcagaaaggtgccctacgactggaccatctactacctgcggaagaaagccctgaccgagaagatcagcaaagaggaactggcctggattctgctcaacttcaaccagaagcggggctacttccagctgagaggcgaggatgaagaggtgcagggcaagaagatcgagttctacgccctgaaggtcgtgcgcgtggaagatacaggcgagaagaagggcaaagacacctggtacaacgtgtacctggaaagcggcctgggcgacaccgatgactattgggtttacagacgggccagcagcgtgcccattgatgagtgggagggccaagtgaaagagttcatcgtcaccaccactctggacaacaacggcagccctcagatcgacaaagagggcaaagtcaagcggagcttcagcatccccaagcctgaggactggatgctggtcaagaaaaagaccgaggtggacatcaagagcagcggcaagacagtgggcacctacatctacgacaccctgctgcagaagcccgatcagaagatcaagggcaagctgatccggaccatcgagcgcgagaactacaccaacgagctgagcctgatcctggaaaaccagaagaagttccacctggaactgcaggaccgcgagctgtaccaccagtgtatcgagctgctgtactgcaagaatgaggcccacaagagagtgatcggcagctgggatttcaccagcctgttcatcaaggacatcctgttctaccagcggcctctgaagtccaagaaggctctgatcgacaactgcccctacgaggaaagcttctacatcgagaatggggagaagaagtctaagccccggaagtgtatcgccaagtctcaccctctgttccaagagttccggatctggcagttcatctacaacctccggatctaccagaaagtcaaagaggtggacggcaagctgcagttcaacgtggacgtgaccagcgacttcctgagagatgagagcgcctacgtggaactgttcaagtggctgaacgagcgcgccgaggtttcccaagaggatctgctgaagcacctgggcctgaagaaaacaaagacagaggataccgtgtctctgtaccggtggaactacgtcgaggacaagaagtaccccggcaacaagaccagaagcagcatcctgaagaagctgctgaacgacgagaaagaggccctgagcgaggacatcgagctgaagatctggcatctgctgtatagcgtgctggcccagagcgagatcgataaggccctgtccagcaagaatgtgtccaccaagggcatctacagcgagctgtccgtgtacttcagcgacgagacaatccagaaaatcaagaacgtgaagctggaatccggctacggcagctactctgccaaggccattggaaagctgctccctctgatgcggagaggcaagtactggaacctggaatccatcgacaaccacaccaaagagcggatcgagaagattctgaacggcgagtgcgacgaaaccatccgggccagaaccagagaaaagagcatcagcctgaccgacatcagccagttcaagggactgcctctgtggctggcctgctacatcgtgtacgacagacactccgagctgaaaaccatcaagaagtggaacagccccgaggatatcaacaagttcctcaaagagtttaagcagcacagcctgcggaaccccatcgtggaacaagtgaccatggaaaccctgcgggtcgtgcgggacatttggagaagagtgggcagcatcgacgagatccacattgagatgggcagagacatgaagcagacagcccaagagcgggccagatgtagcgccatcatcagccggaacgagaacaacaacctgagaatcaaggctctgctgcacgagtttatgaaccccgagctgggaatcgagaacgtgcggccttatagccccgcacagcaagagattctgcggatctatgaggacggcgtgctgagcagcgtgtccgagatcgaggacgagatcaagaatatcctcaagaagttcaacgagtccgaggaaggcaagcggcccaccaaaaacgagatcatccggtacaagtgctggctcgagcagaagtacagaagcccctataccggcgagatcattcccctgggaaagctgtttacccctgcctaccagatcgagcacatcatccctcaggccagattcttcgacgactccttcaccaacaaagtgatctgcgaggccgaagtgaacgccaagaaaggcgatctgctgggctacgagttcgtgaaagagaaaggcggcgagattgtggaactgagcggaggcagaaacgtgcggatcttctccgtggaagagtacgagagctttgtgaaagagcactataagagcaacaagcagaagatgcagagactgctggccgaggacattcccaccgagtttagccacagacagctgaacgatagccggtacatcagcaagtacatccggaacctgctgagcaacatcgtcagagaggatgacgagcaagagtccgtgtctaagaatgtgatcagctgcaacggcgccatcaccgacagactgaagaaagattggggcgtgaacgacgtgtggaaccacatcattctgcccagattcgtgcggctggaagagatcagggccgacaatggcgagaagttcaccaccttcaatcaagagggccacagaatccccagcatgcccctgatgtatcagaagggcttcaacaagaagagaatcgaccaccggcaccacgccatggatgccattgtgatcgcctgcaccaccagggaccatgtgaacctgctcaacaacgagtgcagcaaccctcagaacaacgccaacaagcaccagctgagcagaaagctgagaagatatgagaacgtgtcctacaagcaggacgggaagctgaaagaacgcgaggtgccaaaagagttcctgaagccttgggaagagttcacccgcgacgtggaatttgccctgaaaaacgtgatcgtgtccttccggcagaacctgagagtgctgaacaagaccgtgaactactttcagcactggaaggacaacagctctgagaaagagtggaaagagcagaaatccgccgaccactggtccatccggaagcctctgcacaaagaaaccgtgtccggcgaagtgttcctgtggcggaccagatttgtgtccctgagagaggctctgacaaaccccaagcggatcgtggaaaaggatctgcggagcaagatcctcgagctgcagagaaagggctacgacacaaagcggatcaagaaatacttcgaggataacaaggacgtgtggcaggacgtgaacctgtccaagatcgaagtgcggtactacagccgcgagatcgtggaccctcagaccgagctgcccaagaacagatacttcgccaccagattcggcaacgacctgatcagcctgtttagcggcgtgtccaatttcgagaaggccaagaagattatcgagagcatcaccgataccggcatccagcaaatcctgttccggcacctcgagaacaagggaaacgaccctgtgctggctttcagccctgagggcatcgatgagatgaaccggacaatcaagaccctgaacaatggcaaggaccacaagcctatctacaaagttcggatctacgagtgctccaccatgaagttccctctgggctccatcggaaacaagagcaagaaattcgtggaagccgccaagggcaccaacctgtacttcgccgtgtacgaaaaagaggtcgagaacgaccggggcgagtgtcacaaagagaggaccttcaagacaatccctctgaatgacgtgatccgcaacctgaagcagggcctgtctatcgcccctaacgatgagaatggcaacctgcctgccttcattctgagccccaacgatctggtgtacctgcctacaaaagaggaaagcgagacaggcagcatctcccagcctctgaaccggaacagaatctacaagatggtgtcctgcaccggcaacgaggcccacttcatccctgcctttatcgccacacctattctgcagacaatcgagctgggctctaacaacaaggcccagaaggcctggaccggggagatgatcaaagagagctgcatccccatcaaggtggacagactgggaatgctgatctccatcaacggcaaggccgtgggatcc

SEQ ID NO: 219 - DNA, 4290 bp, Artificial Sequence
  OMNI nuclease sequence
ggtaccaagagagtgctgggcctcgacctgggcacaaattctattggctgggccgtcgtgaacgaggccgagaatcatacagagcagagcagcatcgtgaagctgggcgtcagagtgaaccctctgacagtggacgagagccagaacttcgagaagggcaagagcatcgagacaaacaccgccagaaccgccaagcggagcgccagaagaaacctgcagcggtacaagctgcggagagacaccctgatccagatcctgaagaagcacaacttcatctgcgacgacgccatcctgagcgagaacggcaacaagaccaccttcgagacataccggctgagagccaaagccgtgacagaggccatcagcctgcaagagtttgcccgggtgctgctgatgatcaacaagaagagaggctacaagagcagccggaaggccaaaggcgacgaggaaggcacactgatcgacggcatggaagtggccaagatgctgtacgacaacgacatgacccctggcatgctgtgcctgcagctgatgagaaacggcaagaaaaagatgcccgacttctacagaagcgacctgcagagcgagttcgaccggatctggaactttcagaaaaccttctacgagacaagcctgacaccagccgccagagaggaaatcatcggcaagaacaagtcccagacctgggccatcctgcagaaacacttcgtgtgggagaagcaggccatctcttggagcgagagcaatgcccagaccgagacagtgaccgagaagtgtagactcgtgggcctgaagagacagaccaaaggcgtggacctgaaaatcgagaactacgagtggcgcgtgcgggccctgtctgagagaattgatcctgaggaactggccatcgtgctgcaagagatcaacggcgagatcaacagcagctctggctacctgggcgccatcagcgatagaagcaaagagctgttcttcaagaacctgaccgtcggacaggccctgctgcagaagatcgagaagaatccccacaccagcctgaagaacatcgtgtactaccggcaggactacctggacgagttcgagacaatctgggaaaaacaggccgagtatcaccccgagctgacaaaagagctgaagcacgagatccgggacgccgtgatcttctaccagcggcggctgaagtctcagaagtccctgatcagcatctgcgagtttgagcgcgaggaccgcgagagaaccgtgaatggaaagaccaaggccttcgtggccggctgcagagtgattccaagaagcagcctgctgttccaagagttcaagatctggcagaccctcaacaacatcgaggtgttcattgccgacggaaagaagaagcggcacagaagctctacacccgaggccagcctgttcgacgatatcgccgatcctctggacatcaccggcagaaggctgctgacactggaagagatgcacaccctggccgaagaactgagcgtgcgggacaagatgaagaagaacgagatcatcaaactgctgttcggcaaccggaccgacctggatctgaattacaaagagatcgacggaaaccggacctggcacgagctgtacaaggcctttagcgagatcctggaaaacagcggccacgagcctatcaacttcaagcacagcaccagctgcatcaaagagcaagttcggagcgttttcacagccctcggctggaacacagccatcctggattttgatagcagcgccccactggacacccaggtgtcatatcaactgtggcatctgctgtatagcttcgagggcgacaacaccaagacaggcgacggcaagctgatctccaagctgtgcgacatctgtcgcttcgacaaagagcacgccagaatcctgagcaacgtgtccttcatcgaggactatggctccctgagcgccaaggccattcggaagatcctgccttacctgaaagagggcaacctgtacgataaggcctgtggcctggccggctatagacattctgccagcagcctgaccaaagaggaaattatcaacaaagaactgaagcccttcctggacatcctgcctaagaacagcctgagaaaccccgtggtggaaaagattctgaaccagatggtcaacgtcgtcaacgagctgatcaagacatacggccccttcgacgagatcagagtcgagctggccagagagctgaaaaaatcccagaaagagagagaggaactgagcagcgccatcaacagcgccacaaaagaactggaaaaagtgcggaacatcctcaagaccgagttcaacatccctcatcctaccagaaacgacgtgatccggtacagactgtacgaggaactcaaggacaacgactacagaaccctgtacagcaacacctacattcccagagagaagctgttcaccaaagagttcgacatcgagcacatcatccccaaggccagactgtttgatgacagcttcagcaacaaaaccatcgaggcccgggacgtgaacatcaagaagtctaacaagaccgcctacgacttcgtgctgtccgagtatggcgaagaaggcctggccagatacagacagcactgcgagagcctgttcaaggataagcggaccaagctgagaaagctgctcatggaagagaaggacatccccgccgatttcatcgagcgggacctgcggaatacccagtatattgccaagcgcgccctgtccatgctgaatgagatttgtcggagagtggtggccacaaccggcagcatcacagatcagctgaggaacgactggcagctggtcgacgtgatgaaggaactgaactgggagaagtataaggccctcggcctggtggaataccacaccgatcacgatggcagacagatcggcagaatcaaggactggaccaagcggaacgatcacagacaccatgccatggatgccctgaccgtggccttcaccaaggacgtgttcatccagtacttcaacaacaagaacgccagcgacaaggccaacagcaacgagtacgccatcaagaacacctacttcgagagcggcagggctatcgctcctatgcctctgggagagttcagagccgaggccaagaaacacatggaaaacatcctggtgtccatcaaggccaaaaacaaggtggtcaccaacaacgtgaacaagagcaagagcggcaagagaggcggcaacagcaagatccagctgacacctagaggccagctgcacaacgagactatctacggcagccacaaagaatacgtgaccaagaccgaaaaagtgggcgcctccttcaccgaagagaagatcatgaccgtgtgccggcagcagtacagagaagccctgctttggagactgaacgagttcaatggcgaccccaagaaagccttcaccggcaagaatagcctggaaaagaaccccatctggctgaacgagcagaaaacaaagttcgtgcctcctaccgtgaaaaccgtggaaatggccaccgtgtacaccatcagaaaggccattagcgccgacctcaagatcgacaaagtgaccgacgtgggcatcagacatctgctccagcagagactggacgaatatggcggagatgccaagaaggcattcgagaacctggatgagaatccgatttggctgaacaaagagaagggaatccagatcaagagagtgaccatcacaggcatcagcaacgccctggctctgcacgacaagagagacaaggacgggaacctgatcctggacaagaacggccgcagaatccctatcgatttcgtgaacaccggcaacaaccaccacgtggccatctacagaaagcctgtgctggataagcagggccagcagaagtacgacgacgagggcaatgccatgtttgagctggccgaaaacgtggtgtccttttacgaagccgtggccagagtgaatgagggactgcccgtgatcgacaagaacttcaatagagaggaaggctgggagttcctgtttaccatgaagcagaatgagtacttcgtgttccccaacgagaaaaccggcttcaaccccaaagaaatcgacctgatggaccccgccaactaccagatcatctcccctaacctgttccgggtgcagaagttctccaacaaggactacaccttccggcaccacctggaaacaaacgtcgagactaacaagaacatgcaggatatcgcctggaagcggatcaccagcttcgccatcatggacaagattatcaaagtccggatcaaccacatcggccagatcgtgaaagtgggagagtacggatcc

SEQ ID NO: 220 - DNA, 3786 bp, Artificial Sequence
  OMNI nuclease sequence
ggtaccaagcagatcctgggactcgatctcggcgtgggatctgttggatgggccgtgatcagacagagcgacaacacccctgaggaaatcagcatcgaaggcctgggctctagagtggtgcccctgaatagtgacgagacaaccggcttcaccaaaggcaacggcgagagcaagtgtcacgagagaaccctgaagcggagcatgcggagaaacctggaccggttccagcagagaagaaagatgctgggccagctgctggatgagctgggcatgacctttgacagcgacctgctgagactgagccctctggaactgtggcagctgagagctgatgccgccgatggaaaacctgtgtctgctgctcagctgggcagagtgatctaccacatcaacatgcggaggggctacaagagcagcaaggatgaggaatctgccgagggcgccgacaagagaaagcagtctgagtacctggccaagatcagcggcagagccagagaagccgccgaagctaatcagacccctggccagtatttcgccgtgcggctgaaagagagcgcctacacaacacctagcggcgccacatgctgcagctaccggatcaaagagcagacattccccagacacgcctacatcgaggaactgagaagaatcctgaacgcccagagacagcatctgcccgatatcctgaccgacgccaatatcgccagaatcgtggacaccatcttctaccagcggcctctgagaagctgcaagcacctggtgtctctgtgcgagttcgagagccacgagatcaccgacagcaagggcaacaagctgatcgtgggacctagagtggctcctgcttctagcccactggctcaagagtgcagaatctgggaagccgtgaacaacctgagcctgatcaaccaccacaaccggaagagaaaggacagccctctgcctagcctgttcgatatcagcagcgacgccagaaagctggcctacgagtaccccatcgacgacaacgacagacggatgattgtgggcttcctgaacgagaacgagaagatgaagggctccgatctgctgaagctgctgcggctgagaaaggatgatggctttgccgtgcctgctcaggtgtccagaggactgaagggcaacgtgacccggaatatgctgagaaaagccctgggagatacccctggcgccgacgatctgctcagattcgacatcgagatcgtggaaaccgaccagtacgacgaagtgaccggcgctgccaagacaatggtgtccgatagctacctgagagagcccctgtaccagctgtggcacacatgctacagcgtgtccgacttcgacgagttcgacaaggccatccggaagaagttcggcatcaccgactccgaagtgatcaaccggctgttccacctggacttcagaggcatgggctacgccagcaagagcgccaagatgatgaccagaatcatcccctggctgcagagcggctacaagtactctgaagcctgtgaactggccggctataagcacagcagctacgtgaccgccgacgagaatgctacaagacctctgctgcaacagctgcctcctatccagaacggcgatctgagacagcccgtggtggaaaagatcctgaaccagatggtcaacgtcgtgaacgccgccatcgataagtacggccccatggacgagattcacgtggaaatggccagagagctgcggagaggcaaggaccagagaaaggccgactacgagcacaacagccgcagagagaaggacaacgaccggatcatgaaggtgctggtcgagaagggcctgaagggaagcagaacccagatccagaaataccggatgctggaagagtccgatttctgctgcatgtactgcggcaagcctatcaacgacatggaatttctgcggggcatcgaggccgacagagaacacgttatccccagaagcctgttcttcgacgacagcttctccaacaaagtgtgcgcctgcagacagtgcaatgccgccaaaggccagatgaccgcctacgatttcatggccgctcagggcgacgataccctgaccaccttcatcaacagagtgaacatgctgctcgaccggtacaagaagtctggcggcagagagggcatcagcaagaccaagcacacaagactgctgacagccctgaaggacatccccaaggacttcatcgacagggacctgaggctgacccagtacatcacaagaaaggccctggatatgctgcacgccgtgtccagaaatgtgatggccacaagcggctccgtgaccgatttctttagacatgcctggggctacgacgagatcctgcacagcctgaacttcgccagatatgacctggccggacagaccgaccagactgaagtgatccacaagggccagacacacctggaaacaagaatcgccggctggaacaagagactggaccacagacaccacgccatcgacgccctgacaatcgctctgacaagacaggcctacgtgcaccggctgaacagtctgaatgcctctggcggagatagcgccgatggccagtctgattctgaccagctgaccggcaatctgaacaagtgggccaccagcagacctcatccatctgtggctgctgcctctgatgccgtggccgatatcgccatcagcttcaaggccggcaagaaagtgaccgtgccaggcaagagatacacctacaagggctccaagagaacactggcccaggatggactgctggttcctagaggcgccctgaccaaagaaagcacatacggcgtgcggaagatgcccattggcctgcagccactgaagtacctgttcaacaaccccagcgagatcgacgatatcagaatcctcagagccgtggaagccaggctggccgataatgccaatgatgccagcaaggccctgaagtcctgcaagagaaggcctctgaccgtggaaggctccgatgtgcctgtgactgaggctctgtgtctgaagcccaccgtggtcatcagagtgaagctgacctccgtgacacccaagaactgcagcgatatcgtggatggcgccgtcagggaagctgtggccaccagatacgaggaagttggcggctccgccgataagtttgtgaagtccctggccgagcggccactgtatagagatgcaggcggcagactgcccatcacctctgtgcggattagaaagggcctgtctcctgagagcatcacccctgtcagatacgacagccacggaaatgccatcggctacgccgagttcggcaacaaccaccatatcgccctgtacgagaagcccgacggcaccattgaagagtgcgtggtgccttttgccgaggccgttagaagcagacaggccaatctgcccgtggtcgtgacagatcctcaagcactctggcagcagattgacatgctggacaaagagctgcccgagagcagcctgtccagatttcctagccacgacagcagatttctgatgagcatgcaagtgaacgagatgttcatcctggggctgtccgacgaagagttcagcgatctcgtgcgggacgagaacagacacgagctgacaagccacctgtaccgggtgcagaaactgtccagcctgtactacgacttcaagctgcacaccagcacactgagcgactgcaccaccgatcagatgaattgcggcaactacatccggatcgtgtctttcagcgccctgaagaagtacaaccccatcaaagtgcgcgtggacatcctgggaaacatcatcctgcctagcggatcc

SEQ ID NO: 221 - DNA, 3753 bp, Artificial Sequence
  OMNI nuclease sequence
ggtaccaagaacatcctgggcctcgatctgggcacaacatctatcggatgggccctgatcaagaccgacgacaagaacaaccctcacgagatcctgcggatgggcgtcagaagagtgcctctggccgagaacgaggacaacaagtttgtgaagggccagagcatcaccaccaacgccgatagaaccacagccaggggcatcagacggaacaacgaccggtataagctgcggagacaggccctgagcaaagagctgtctctgctcggaatggcccctagcgacgctctgatgaagctgcatctgctggaactgtggcagctgagagccaaggccgtgaccgatgaagtgtctctgacagagctgggcagaatcctgtacctgctgaacaagaagcggggctacaagcacagcagcatcgacgaggataagagcaagcgggacttcgtgaagaaagtgaacggcagatacgccgagctgcaccagaccaatatgaccatcggacagtacgtggcctggaagatcagcgagacagccatcaccaaagagggcaagacctactacgtgtacagagtgaaggaccgggtgttccccagaagggcctacgaggaagagttcgacgccatcatgcagtgtcagcagatgtatcaccccgacgtgctgaccaacgaagtgatcgaccggatcagaaacaacatcatcttctaccagcgggacctgcggagctgcaaacacctggtgtccgtgtgcgacttcgagaagcggcacttctacgacaaggacggcaagctgaagcgcaacaagaaggacgagatcatctacgacggccccaaggtggccccaagaacaagcccactgttccagatgtacaagatctggcagagcgccaacaacatccggttccacaaccggaacaaagagtacctggacatcaccagagagcagcggagagaaatcgccctgtacatggacaacaatgagatcatcaagctcgaggacgtgaagcggattctggaactgaacgacgacagccggtggtactgcgacaacgccatcaagaacggcatcaagggcaacaccaccaagcacgccattgtgacagccctgtctagcctgagccaggacaagatcgccgagatcacccggttcaacctggaaatggaacccaccgagatggtggatgccgagacaggcgaagtgctcgtgcggatcaagaaaacctaccagagagagcccctgtaccggctgtggcacatcgtgtacagcatcaagaaggatgaggaacggaagtccgccgtggccaagtttctgcagagcttcggcatcgacaacaaagaaatggtgcagcggctgagcgacatcgacttcagaacacctggctacggcaacatcagcgccaaggccatctgcaagatcctgccttacatgaccgagggcatcgagtacagcgaggcctgtgaatacgtgggcatcaaccacagcaacagcctgtccaaagaggacaacgagaagcgcgagctgatgagcgagatccccatcctgaagaagaacagcctgagacagcccaccgtggaaaagatcctgaaccagaccatcaacgtgttcaatggcatcaatgccgagctgagaaagaagggcgagagaatcgacgaagtgcgcgtggaactggccagagagctgaagcagagcaaagaagagagacacaagaccagcgaggaaatgaaggccctggacgataagaacaatgagtacaagaagatcctcgagaaagagtatcacctgaacgccaccagaaagaacctgctgcggtacagactgtggatcgagagcaacatgagctgcttctactgcggccagcctatcggcttcacccctttcgccaatgagcctgaggaagagagagagcacatcctgcctaagagcctgcactacgacgatagcttcgccaatcaagtgtgcagctgccggaagtgcaacagcgagaaaggcggaagaactgccctggactacatgcggaccacaagccacctccaggactacctggatagagtgaaccagctgcatcaggcccacaagatctccggcaagaagtatacccacctcctgaccagctacgacgactacatggaacgcaagaagaacgggaaagagacaaaagaggatatccagatttgggagaaccccatcgacagacagctgagactgagccagtacatcagccggaaggccatggaaatcctgagctacgcctgtagagatgtggtggccacaagcggcaccgtgaccgccattattagacacgcctggggctacgacaccctgctcgaggaactgaatatgcccatctaccgggacgccaacctgaccgagtttgtggaaatcgagtccaaggggcagaagctggaaaaagaggtcgtcaagaactggaccaagcggctggacaacagacaccacgctattgatgccctggtggtggcctgcaccagcagaagcttcatccagaagatcaacaccctgcacgccagcaagcaagagatgagaagcgagatcgccagcgccagaaaaaagtgggacgagaacaatatcctgatccagtggctgcacgagaagaaccccttcaatagacaggatgtcctgcagcacgtgtccagcatcttcgtgtccatgaaggccggcaaaaaagtgaccgtgcctggcaagcggaaagagtttaagcacggcaagcccgagatcaagcaagaaggcctgagaatccctcggggccctctgcatgaagaaggactgtacggcagcatcatggtcaacggcaagagggaaatcgtgatccggtacaagctcggcaagggcgccatcggctacctgttcagaggcaaagaaaagtgcgaagtgaagaaaaacaagaccggggagtatatcctgaaggatggcatcggagatgtgctggacagcatcgtggacaagcacatcagatccctggtggaagtgcggctgaacagaaagttccccaagggcgaaacctacagaagcaaggccgagaaggccaaaaaagaaggccggaagtacgacggggagaagagatgcaaaaccgctctcgagcagttcaaaggcctggacaaggaccccatctacttcgacgacgacaaaacccgggtcgtgaaatacgtgcggtgcaagacaggactgaatgccgtgcggcccctgagatacaacgacaacaacgagcccatcacctacgctctgcccaaaaacaaccaccacgtggccatctacagagacaagcagggcaatgccgtggaaagcgtgtgcaccttttgggaagccgtggaacggaacaatcatcacatccccagcatcatcagaaaccccggccaagtgtgggacgacatccagagaagagaaacaaacggcgaggaactccctgccgtgctgaaaaaaaacctgccaaagagcgactggaccttcgtcgagagcatgcagcagaacgagatgttcgtgctggatatggaccgggaaaccctggaacagcacattgccaccggcaactactccgccatcagtccccatctgtacagggtgcagagcctgtccgacggcgattacatgttcagactgcacacagaccccaagagcgagagaaccctggacgccaataccagcaggcggttcatccggctgaagttcaagaagttcatcgagagcgagcaccacaaggtggacatctctatcctgggcaagatctctatcgcccctggatcc

SEQ ID NO: 222 - DNA, 4230 bp, Artificial Sequence
  OMNI nuclease sequence
ggtaccaagaagatcctgggcctcgacctgggcaccaattctatcggatgggccgttgtgtccgccgacgagaatggcaaccctacacacatcgaaggcatgggcagcagaatcatccccatgggctccgacaagatcgactacgagaagggcgccaccatcaccaagaacgccgacagaaggaccaagcggagcgccagaagaatgggcaagagatacaagatgcggcggaacaagctgctgttcatcctgagcagactgaacatgctgcccgagcagatccagttcaagaccgactttcccgaggccaccaagatccagaacctggaactgctgcctatcagcaagaacaccatgcagctggacagcctgcagcactacgagctgagagaaaaggccctgcacggcaagattgccctgcaagagctgggcaagatcctgtaccagtacaaccggctgagaggctactctggcggcggagatgacaacgacagcaagatcgagaaaaccgaggacgacgacaacaagaaatacgaagtgcgggtgcagaagttcattctgaaggacgtggccaagagcgacagcacctatatcgccaagtccggcaaggacaagggcaaagagctgcccatctacaacgtgatcgtgctggacgaggacgaggaaatcgagggcaccacaaagctgcagaccctgagcgagaagatcggcgaagagatcgagctggaaatccggatcaagaagatcaaaaagggcgcctctatcgccttcgctctgccccagaaaacaaactggcggaagcagatggaagagacagagcacttcctgaaggccaagaactactacccctgccagctgttcgccgaggacctgagaaacaacaagtggacaaagatccggaaccgcgtgatcctgagagagcagtacaagcgcgagttcgacgctgtgtgggatgagcaggccaagcactatcccatcctggaaaagtgccccaacgacgtgctgaacgagatcgtgtcctacatcttccccggacctagcgactcccagaagaaactgagagaactgggcctgcgcaacggcctgaagtacatcatcaaagagcagatcatctactaccagcggcctctgaagtcccagagcaacctgatcggcacctgtcagttcgagaaagaagagaaagttatccccgtgacgcaccctctgttccaagagttcagatgctgggaccagatcaacaggctgtacatcagaagcaagcagcagatctggaacgagaagaaaggcaagttcgtgctgcagtaccagaacagatacctgaccgacgagcagaagtacagcatctacaatcggctgcaagaacagaagcagctgggcttcaaagaggtggccaaaatcgtcaacctgggcgacgacaagtccgagtttctgtacggactgcacgtgaaagccaagctgagcggctgcgataccaagatcagcatcaagaaaatcctgaagggctacttcgagcccgacaccacactgattgagaagatctgggaagccgtgtacaacaacgtgcacgagggcagcgagtacaacgagagcagcaagagagtgctgagcatcatcgacatcctgcctgagacactgggagatgagagaagaaccgagctggccctgaagatcgcccagaacatcaagttcatccggaagtacgccagcctgagcaagaaggccatcgagaacattctgcccatcatgcggcccaatcctgacgtgatccccgagaaagtgaagaagaacttcgaggacatcaagtggctgatcgacaccggggaagtgatcgacgagtccattctgcaggactacatcatcgagttcgtgaaggacaaccctcaggctctggaacacggcggcctgatgtatgcctttgccagctctctggtgtacggccggcacaccaaagaagatgtgaaaccccagctgaaggactaccacgacatcaaatacgtggaacggaacctgcggaaccccatcgtggaacagatcgccaacgagacaatgcaggtcgtgaagtccctgtggaagcagtttcacctgaatccagacggcctggaaatcagagtggaactggccagggacctgaagaacagcgccaaagagagagagaacatcttcaaggctcagaacaagaatcggagcggcaacgagcggatcaaagagaggctgaagcaagagaacgtgcccgtgaccgacctgaacatcctgaagtataagctgtacgagcagcagagctacatcagcccctacaccaagaataccattgccttctccaagctgttcgacgacaatttctacaacatcgaccacatcatccctaagagccggtacttcgacgactccatcagcaacaaagtgatctgcgagagcaacatcaacgaggaaaaggacaacagaaccgcctgggagtacatctgccagcagagcagccagtacaccatcctgacacctgaggcctacctgaaccacatcaactccagcttctacggccagaaaaagaagaatctgctggccgagaagattcccagcaatcccgtgaccagacagatgaaggacacccagtacatcagcattgccgtgaaggatgagctggctaagatcgtgggcagcgaacacgtgaaaaccaccacaggcggcgtgaccgattacctgagatctctgtggggcctgagaaagctgttcatggaactgaccgaggccaggttcaaacagatggaactgtggaatatcaatgaggacggcacccctaaagagtcctgggtcaagaagggatacgataagatcacccacaagaacgtgtacgagatcaaaggatggtctaagagatacgaccaccggcaccactccatcgatgctctggtggtggccctgtgcaacgagaagtttatcaagcggctgaacgatctgaacaagtacttccaagaggaactcgccaagcacaagagcagcatccccattctggatgaggacagcctcgagatcgccttcttcaacctgcctaaagagaagcgcaacaagatcatgcaagagattgagagcagccggaagttcgatgcccctttcgataatctggtggctgaggccaagtgccagctggaatccatgatcgtgtctcagaagtccaaggataagctgtctatcaaagaggacttcaacggcaagaaacagctgaagatccgggctgccctgcaccaagagacatattacggcaagaccaacggcagggacaccaagacaatcgccatctccatgctgaaggctaaggacatcccacagatcgtggacgaggtgctgaagaaagaaatcgacgcccaccggaagaaatatgagagcatgaaggaagccttcaccggcgagggcctgatcgcctttaatgagagccggttccagaccaagaacaagtctgccctgaagcctcctgtgtacaaagtgcggctgtggtactccaacaaagagaaagaaaccggcaacctgcagcctctgtacggcaaggccgccaagaaaacagtcgtgaccggcgacaactacatgttcatcgtgatggaaaagtctggcaaccgggtgttcgacattgccagcctgtttgatagcgtggccctggccaaagaatacgtgaagcagggcatcgtggacatcgactacattaagaagaagatttgcgacgacctgcggtacaacagcagcgactctaagggcaacaaggccgacaaagtcatcttctacctgcaacagaacgacctggtgtacatgcccaaagaggatgacgagatcctgcggttcaacgagcttgagttcaagaactggctgagcaacacgaagaacaagattgacttcgccaagcgggtgtacaaggtggtcaagttcacaggcaaggactgctttttcatccccaacaacgtcgccaaagaaatcatcatcccgaaggatatgagcaaagaggaattggacgagctgaagtctaagtacaaggacaaagctatccccaagcaagagcaaaactacatcgagtacggcacctacagcaactgcacccctctggaaatgaacaaactgttcaccatgagcatgcgcgagggcaagaagtacaaaggcgacagaccccggaagatccaggactactgcatcaagatcaagacagactggctgggcaatgtgatcgagttcaacgacatgaagctgggatcc

SEQ ID NO: 223 - DNA, 4548 bp, Artificial Sequence
  OMNI nuclease sequence
ggtaccaagaagatcctgggcctcgacctgggcacaaattctatcggatgggccgtcgtggaacgggacaacgacaacggcagaatcatcaagagcggcagccggatcatccccatggatgctgccacactgggcgattttgccagcggcaataccaagagccagaccgccgagagaaccagcaagagaagcgccagacggatgagagagcggttcctgctgagaagagagcggctgcacagactgctgcacatcctgggatttctgcccaagcactacgaggaaaagatcggctgggacctcgacaacgaccggaagcactatggcagcttcatcgagaacgaggaacccaaggtggcctggatcagaaacgaagagaagaaatacgagttcatgttccagagcagcttccacgagatgctcgaggacttcaagaagtatcaccccgacatcctgagcgacggcaagaagattccctacgactggaccctgtactacctgcggctgaaagccctgagccagcctatctctaaagaggaactggcttggatcatcctgaacttcaaccagaagcggggctacaaccagcagagggatgaagtgctggaagcctccgacgacaagaaagaagagtacaagtgcctgaccgtgctgagcgtgacacccgatgaggatgccaagggcaaagacatctggtacaacatcagattcgagaacagcgacatcgtgtaccggcgcaagagcaagtaccctctgaactgggtcggaaagaaacggaacatcatcgtgaccaccaagctggacgaggacggcaaccccaagctgaagaaggacggctccatcgactacagcgtgaagtcccctaacgacgatgattggaccctgcagaagatcaagaccgagcaggacctgaaggacagccaccagacagtgggccagtttatctatgccgctctgctggccaatcctagcgagaagatcagaggcggcatcgtgcggaccatcgagcgggacttctacaaagaagaactggaaaccatcctgaagaagcagagccagtttcacgccgagctgaaggatcggagcctgtacgagaagtgcatcaacgagctgtaccggaacaacgagagccacagaaacaatatcgccaagaacgacttcgtgttcctgattctcgaggacgtgctgttctaccagcggcctctgaagtccaagaagtccctgatcgacgactgcccctatgagagccaccagggcattgacaaagagacaggcgagatctgcacatacccactgaagtgcattgccaagagcaacccctacttccaagagtaccgcgtgtggaagttcatgagcgacctgcggatcattgccaacaccaaagagatcaacggccacatccacaccgacgtggacgtgaccagcgagttcatccccgataacgagagctggtccaacatgttcatctggctgaacgacaagggccacatcacccagagcgatatgctggcctacctgggcatcaagaagaaagagcagtccaagtaccggtggaacttcgtggccgataagcactaccccatgaatgccacacggcacgccattctgaaccggatgaaggacgatgagctgctgtccagagagctggaacaggccatctggcatctgctgtactctaccaccagcaaggccgagatcgacaagagcctgtctcctagcgatacccctagctgcatctacacaaagctgatcgaggccggcttcagcgaagagagcatcgagaagattaagacaatcaagctgcccgacgaaggctacggcgcctattctgagaaggccatcaagaaactgctgcctctgatgagatgcggcaagctgtgggacgagaagggcattcaccctagcacactgcagagaatcgacgccttcagcaaaggcgaaggcatggacgacttctccgagaacgtgaaccagcggctgagcagcatgtccggcatcgattcctttcagagactgcctgagtggctggcctgttacgtggtgtatggaaagcacagcgaggccaatgacatcgtgaagtggaagtccccagacgacatcaacatctacctgaacaacttcaagcagcacagcctgcggaaccccatcgtggaaagcgtgatcctggaaaccctgagagtcgtgcgggacctgtggaagagatacggcaacatcgacgagatccacatcgagatgggcagagaactgaagaaccccagcgacaagagagcccagatcaccaagcgcgtgctggaaaacgagaacaccaacgtgcggattaaggccctgctggccgaatttctggccgaagagtataagatcgagaatgtgaagcctcacagccccagccagcaggatctgctgaggatctacgaagaggatgtgctggcccacaacgagcccgacgacgagctgaaagacatcatcaacagcctgagcaaccctaccaagcagcccaccagaacacaggtgctgagatacaagtgttggctggaccagaagtactgcagcccttataccggccagccaattcctctgagcagactgttcacctccgactacgagatcgagcacatcatcccacagagccggtacttcgacgacagcttcagcaacaaagtgatctgcgagagcgaagtgaacaagctcaaggacaaccagctgggctacgagtttattaagcagcaccacggccagaccgtgcagctggcctctggaaaaatggttcgagtcctggaagtggaacactacgagcagctcgtgaaggacaacttcgcccagaccaagcggagaaagctgctgatggatgacatccccgccgagtttatccagcggcagctgaacgatagccggtacatcagcaaagtgattaaggggctgctgagcaacattgtgcgcaccaccgacgaggatggaaacctggaaagagaggccatcagcaagaacgtgatcacctgtaacggcagcgtgaccacacggctgaagagagattggggactgggagaagtctggaacttcatcatcctgcctcggttccagagactgaatgagctgaccggccggaactgcttcaccaccttcaatacccacggcaacgagatccccgccatgccactggaactgcagaagggcttcagcttcaagcggatcgaccacagacatcacgccctggatgccatcgtgattgcctgcaccaccagagaacacgtgaacctgctgaacaatgagagcgccctgcctgagcaccaagagatgaagcacgccctgtctcacaagctgcggagatgcgaggaaatcgtgatcaacggaaagaagcggcggatcttcaaagagttcatcatgccctgggccagctttaagaacgacaccctgctgagcctgcagcagatcgtggtgtcctttaagcagaacctgcgggtgctgaatcaggccaccaacctgtacaccaaatacgtgaacggacagaaaacactgagcgcccagcacagcagcgaccactttgccatcagaaagagcctgcacaaggacaccgtgttcggccatgtgaatctgcagcgcaagaccaccatcaaactgaaggatgccctgaaagacgtgaacaggatcgtggacaagaggctgaagcggaagatcaaagagctgcgggccaaacactacaacgataagcagctcctggtgtacttcaaggactacgcctacgagtggaagggctacgacttcaacaaggtcgaggtgttctacttcaccgatgagaaagaacctatggtggccacacggttctgcaacgacctggtgtccatcttctccggcaagacaaaaaagcaggacgtcgagaaagtgatcgcccagattaccgacaccggcatccagaaaatcctgaccaactacctgaatgagaacctggacaagatcgagtacgccttctccgccgaaggcctggaactgatgaacgagaatattgccaagtacaacaacggcaaacagcacaagcccatctacaaagtgcggctgaccgagactctgggccagaagtttcagatcggcatcaccggcaacaaggccgccaaatatgtggaagccgccaaggggaccaatctgtactttgccgtgtaccagaacgaagagggcagcagaagctttagcacaatcccactgaacatcgtgatcgagcggatgaagcagcatctgagccccgtgccagagtgcaatgataagggcgagttcctgcagttctatctgtcccctggcgatctggtgtacatccccaccatcgatgaggaaatcaacaacatcggcaatgagaacgaccctcaccggatctacaagctggtgtcctgtacctccaacgaggcccacatggtgcccgcctatatcgcctctcctatcatccctacaacagagctgggcagcaacaacaagtctcagagagcctggaccggcgagatgatcaaagaaatctgcatccccatctccatcaaccggatcggcgagatcaagatcaagggatcc

SEQ ID NO: 224 - DNA, 4593 bp, Artificial Sequence
  OMNI nuclease sequence
ggtaccatcaagaagcagatcctgggcctcgacctgggcacaaattctatcggatgggccgtcgtgaacaagacccaagagtctgatggcgtgtaccacctggacagcatcatcgatgccggcagcagaatcatccccatggatgccgccatgcagagcgactttgccagaggcaataccatcagccagaccgccgacagaacccactttagaggcgtgcggagactgagagagcggtgcctgctgagaagagaaagactgcaccgggtgctgtacctgatgggcttcctgcctaagcactacagcgacagcctgaccagatacggcaagttcaaggattgcaccgagtgcaagctgccctggaccacagatgaggaaggccacttcacctttctgttcaagaaaagctacgacgagatgctgcagatcttctggcaggttcaccccgagctgatgaagcagggcatgaaggtgccctacgactggaccatctactacctgagaaaaaaggccctggtggaagccatctctggcgccgaactggcctggattctgctcaacttcaaccagaagcggggctactaccagaccagaggcgaggaacaagaggaaaacaagaccgagaagaaagagtactacgccctgaaggtggtggacgtggtggataccaacgagaagaggggcaaagacacttggtttgacatctacctcgagaacaacatgatctaccggcggaccgccaaagaggcccctgattggatcggcaaagtgaaagagttcatcgtcaccacacagctgaacgaggacggcacccctaagctggacaaagagggcaagatccggcggagcttcagaatgccctctgagaatgattggggcctcgtgaagatcaagacccaggccgatatcatcgacagccacctgacagtgggcgcctacatcttcaacgccctgctggccaatcctaagcagaagattaagggcaagctcgtgcggaccatcgagcgggacttttacaaggacgagctgaaggccatcctggactcccagaagagattcatccctcagctgcaggacaacgagctgtacaaagaatgcatcaaagagctgtaccagcagaacgacgcctaccggaatagcatcagcggccacgacttcacctacctgttcgtggacaatatcatcttctaccagcggcctctgaagtccaagaagtccctgatcgacgagtgcccctacgagagccacctgtacatcgacaaagaagggaagcaagtcgagaagcacgtgaagtgtatcgccaagtctcaccctctgttccaagagttccggctgtggcagttcgtggccaacatccggatcttcgagcacagaaaggacgagaacggccggctgctgaacgatgaggatgtgaccagccagttcctgcctgacgagaacagcagagtggtgctgttcgagtacctgaacgacctgagcagcatcacccagaaaaccctgttcgagaagtactttggcatcaaaaagaccaagggcaagaacgccgagattccctaccggtggaactacgtggaagataagcagtacccctgcaacgagacacggggcgagattctgtctagactggccaagagcgagatcgacagcagcttcctgaacaacgaggccgaggaatccctgtggcacatcctgtacagcgtgaacgaccggaatgagctgcacaaagccctggtcaagttcgcccagtgccacagcatcgattccagcttcgccgacgtgatggttaagttccctccattcggcagcgactacggcgcctattctgccaaggccatcaagaaactgctgagcgtgatgcggatgggcaagtactggaaccaggccaatatcgacgccagcacactggcccggatcaacaagattgtggatggcgaggtggacgagagcatcagcaagagagtgcgggaaaagaccatctctctgaacgacatcaacagcttccggggcctgcctctgtggctggcctgttacgtggtgtacaacagacacagcgagacacaggacaccgacagatgggagaagcccgaggatatcgatgcctacctgaaaaccttcaagcagcacagcctgcggaaccccgtggtggaacaggttgtgacagagacactgagagtcgtgggcgacatctggaaaacccacggccacatcgacgagattcacgtggaaatgggccgcgagatgaagaaccccgccgacaagcggaagaagatgaccgagagagccgtggaaaacgagaacgccaacctgagagtgaaggccctgctgaccgagtttctgaaccccgagttcgagatcgagaacgtgcggccttacagcccttcacagcaagagctgctgcggatctacgaggacacagccctgaatagcgtggacgatctggaagatgacatcagcgacatcatccggaagtttgcccagagcgaggtgtccaaaagacccagccactccgaggtgctgagatacaagctgtggctcgaccagcactacgtgtccccatataccggccagacaatcccactggccagactgttcacccctgactacgagattgagcacgtgatccctcagagccggtacttcgacgactccctgagcaacaaagtgatctgcgagagcgccgtgaacaaactgaaggacaactgcctgggctacgagttcatccagaagcaccacggcgagatcgtggatctcggaggcggcagaattgtgaagatcctggaaatggacagctactgcgccaacatcgagaagatctacaagaacaaccggaccaaaatgaagaaactcctgatggacgacatccccgccgagtttatcgagcggcagctgaatgatagccggtacatctccaagctgatcaagggcctgctgtccaagatcgtgcgcgaggatgatgagcaagaggccaccagcaagaacgtggtcgtgtgtacaggcagcgtgaccgacagactgaagagagagtggggcatcaacgacgtgtggaaccacatcatcctgcctagattcgagcggatgaacgagctgaccggcaccaacaagttcaccagcatcagctcctccggccatctgatccccgatatgcctctggaactgcagaagggcttcagcaagaagcggatcgatcacagacaccacgccatggacgccatcgtgatcgcctgtaccaccagagatcatgtgaatctgctgagcaacgaagccgcctctcctaagagcaaccagaacagataccagctgagcagaaagctgcgcagatacgaggaagtgaccatcaaaagagatggcgagattaagaccatcagcgtggccaaagagtttaagatgccctggcctagcttcgccagcgacgtggaaaaagccctgaacaatattatcgtgtcctttaagcagaacctgcgcgtgatcgtgaaaaccagcaaccacagcatgagattcgtggacggcaagaaacggatgctgaagcagacaaagggcgacagctgggccatcagaaagtccatgcacaaagaaaccgtgttcggcgaagtgaacctgaggcgcgtgaaaacattccctctgaaagaagccatgaagcggcccgagagaatcctggatagcgagctgaaagaccggatcaaggccatggtcaagctgggctacagcgagaaacaagtgaaagcctacttcgttgagaacaaggacatgtggtccgacatcgacattaagaaaatccagatgtactacttcaccaaagagacaagcgaccggttcttcgccacacggaagaatatcgacacctccttcgacgaaaacaaaatcacgaacaagatcaccgacaccggcatccagaaaatcatgcagcggcacctggccaattatggcggagatgccgatctggccttctctcccgatggcattgacgagatgaaccggaacatcaaagaactgaacggcggcaccgaccaccagcctatctacaaagtgcgggtgtacgagaaggctaacaagtttgccgtgggccagaagtacaacaagcagagcaagttcgtggaagccgacgacggcaccaatctgttctttgccatttgcgagaacgaggtgcagaacaaacagaccggcgaaatcaagaagaagcggtccttccggaccattccactgaatgaggccatctctaagatgaagctgggacagcccctggatgagaacgccctgttcattctgagccccaacgacctggtgtacctgcctacagaggaagaagtgggctgcgagaagattggcaacatcgactacagcaggctgtacaagtttgtgtccgccgctggcttcagagccgacttcgtgcctgtgaatagcgccaacaccatctacgacgtgaagaaggactacgccgagctgttctgcaacgacgcagtggtgcagaatgagttcggcgtgggcagccccaagagcaagaatgagagagccatcaccggcgagatgatcaaagagacttgcatccccatcaaggtggaccggctgggccacatcctgaagatcggagtgggatcc

SEQ ID NO: 225 - DNA, 4638 bp, Artificial Sequence
  OMNI nuclease sequence
ggtaccagcaacaagaacatcctgggcctcgacctgggcaccaattctattggatgggccgtcgtgaagtgcatcgacaacgaggacaccgagagaaagctgatcggactggtggatgccggcagcagaatcattcctatggatgccgccatgcagtccgacttcgccaagggaaataccgtgtctcagaccaaagagcggacccagtacagaagcgtgcggcggattagagagcggcatctgctgagaagagaacggctgcacagagtgctgagcctgatgggaatgctgcccagacattacgcccaggctctgaccagatacggcaagttcaaggacgacgtggaatgcagactgccttgggccgaaggatctgagggcatgcctgtgttcatttttcagcagagctacgacgagatgctgcagatcttctggcaagagcaccccgagctgatggccaaaggcatgaaggtgccatacgactggaccctgtactacctgagacacaaagccctgcaccaggccatctctggcgaggaactgagctggattctgctcaacttcaaccagaagcggggctactaccaggccagaggcgaagaggatgacgtggacaccagcaaagaggaaaagtactacgccctgaaggtggtggacgtggtcaactctggcgacaagagaggcaaggatacctggtacaacgtgttcctggaaaacggcctggtgtacaggcggagcgccaaagagaaacccgactgggtcggaaaagtgaaggacttcatcgtgaccacacagctgaacgaggacggcacccctaaaagaggcaaagacggcgaagtgaagcggagcatcagcatgcccaaagaagagaattggggcctgctgaagatcaagaccgaggacgatatcagatccagcggccagagcgtgggcgagtatatctttggagccctgctgcggaaccccaagcagaagattaagggacagctcgtgcggaccatcgagcggaccttctacaaagaagaactgcggggcattctggaaaagcagagagagtacatccctcagctgcgggacgccgctctgtacgaggcttgcatcaatgagctgtaccctcagaacgacgcctaccggcagtctatcgccagcaagggctttacctacctgctgctggacaacatcatcttctaccagcggcctctgaagtccaagaaatccatgatcgacgagtgcccctacgagtaccacgagtgcctggatgtgaacggcgagaagatgaagaaatacgtcaagtgtatcgccaagtctcacccgctgtaccaagagttcagactgtggcagttcgtgtccaacctgcggatctaccagtgcagcatcgacgatgaggacgtgaccagccagtttctgcccgatgaggaaagcagagcctgcctgttcgactggctgaacgaccgggacagcatcaaagaagaaatcctgctgaccaagtacttcgggctgaagaagcccaagggcaagaacgtggtgctgccctacagatggaactacgtgcgggacaagagctacccctgcaacgagacaaggggcaagatcctggaacggctgagcaagaacggcgtggacacaagctttctggacgtggaaaacaagaacgagaagaacgtcgaggaaggcctctggcacatcctgtacagcgtgaacgatcccgaacagctgcggagagccctgagaacattcgcccagaaatgcgtggccaagcggtgcatcctgaaccagtctgccaatgacgaagccatgcctgatggcgacgccgcctggatcaatgcctttgtggacgccatggtcaagttccctccattcgagaacgactacggcgcctattctgccaaggccgtgaagaaactgctgtccctgatgagaatgggccaccattggagagccgacgacatcgacgaaaagacccggtctagaatccagaagctgattgacggcgagttcgacgagagcatccgcgagagagtgcgggaaaaagccatcagcctggaccggctggaaaagttcagaggactgcctctgtggctggcctgctacgtggtgtacaatagacacagcgaggccagcgacctgagcagatggcagacccctgatgacatcgatgcctacctgaagtctttcaagcagcacagcctgagaaaccccgtggtggaacaggtggtcaccgagacactgagaaccgtgcgcgatatctggcggaagtacggctccatcgacgagattcacgtggaactgggcagagagctgaaagcccctgctgatcaaagggcccagatgaccgaaagagcactgcagggcgagaacaccaacctgaggattaaggccctgctgacagagttcctgaatcctgagctgggcatcgagaacgtgcggccttttagcccatctcagcaagagctgctgaggatctacgaggatacagccctgaacagcgtgtccgagcctgacgattacgtgaccgagatcatcaccaagttcgccgacgccaagaagcggcctaccttctctgaagtgaagagatacgccctgtggctcgagcagcactacgtgtccccatataccggcgagacaatccctctggccaggctgtttaccaccgactacgagatcgagcacgtgatccctcagagccggtacttcgacgacagcctgtccaacaaagtgatctgcgaggccgaagtgaacaagctgaagggcaatgccctgggctttgagttcattaagcagcaccatggcgagaaagtgatcctgaatggcggcagagtggtcaccatcctggaaaccgatagctacagcgacctcgtgaacaacgtgtacggcaaaagcaaccgggccaagatgcggaagctgtttctggaagatatccccgccgagttcatcgagagacagatgaacgacagccggtacatctgcaagatggtcacaagcctgctgtctcacatcgtgcgcgaggaagaggaagaagaggccaagtccaagcacatcgtcgtgtgtactggcgccgtgaccgacagactgaagcgcgattggggagtgaacgacgtgtggaaccggatcatcctgcctagattcgagcggatgaacaagatcaccaacacacagaagttcaccaccatcagcacctccggccatctgattccagccatgccactggaactgcagcggggctttagcaagaagaggatcgatcacagacaccacgccatggatgccatcgtgattgcctgtgccaccagggaccatgtgaacctgctgagcaatgaggccgctctgcccaagaaccaggccaacagataccagctgagccggaaactgcggagatacgaggatgtgctcgtgtgcagagagggcagatccagaaagatctccgtggccaaagagttcctcctgccttggccaaccttcaccacagatgtggaacacgccctgagacagatcctggtgtccttcaagcagtacctgagagtgatcaccaaggccaccaatcacaccctgagaatcgtgaacggaaagaaaatcagcgtgccccagacactgggcgacagctgggccattagaaagtccatgcacaaagaaaccgtgttcggcgagatcaacctgagaaggaccaagacctttggcctgaagcaggccctgcagctgcctagaaggatcgtgaacagggacctgcgcggcaagatcatgcagctgctggaactgaagtacaccgagaagcagatcaaggcctacttcagcgagaacgccgaagcttggagcgacgtgaacctgaaacagatcgagatgtactacttcaccaaagagacaagcgaccggttcttcgccaccagaaagagcatcgacaccagcttcaaccggaaggccatcaacgaaaaggtggccgacaccgccatccagaaaatcatgctgcggcacctggaacagtacgccgatgatgccacactggccttttctcccgacggcatcgatcagatgaacagcaacattctggccctgaacgacggcaagtaccaccagcctatctacaaagtgcgggtgtacgagaaggccgagaagtttgctgtgggccagaagggcagcaagtcccggaaatttgtggaagccgccaagggcacaaacctgttctttgccatctacgagcagaccgctgtggaccctgctacaggactgagcgtgaagaagcgcagctaccggacaatcccactgaatgaggccatcctcaagatgaagcagggcgtgcccctggatagcaaggccagctttattctgagccctggcgatctggtgtacgtgcccacaaaagaggaacgcagaaccggccagatggaaagccccatcgacaatgagagggtgtacaagatggtgtccagcggaaaaggacaggtggacttcgtgccttatagcgccgccagcgtgatcttttccgtgtctaaagagaacagcagccactactctggcatccagaatgagtttggcgtgggcagccccaagagcaaaaacgagagagcactgaccggggagatgatcaaagaagtgtgcctgcctatcaaggtggaccgcctgggacacctgatcgagaaaggatcc

SEQ ID NO: 226 - DNA, 4731 bp, Artificial Sequence
  OMNI nuclease sequence
ggtaccaagaagatcctgggcctcgacctgggcaccaattctattggctgggccgtcgtgaatgccgacgaggccacaagaaaggacaacaccaagtacctgaagcctaacagcatcagctgcgccggcagcagaatcatccctatctctgccgacatcctgggcgacttcgacaagggcaatagcatcagccagaccgccgagcggaccagactgagaatgatgcggagactgctggaacggaaccacctgagaagagaacggctgctgcgggtgctgaaagtgatggatttcctgcctgagcactacaacagcaagatcagcagatacggcaagttcatcgacgacagcgagcccaagctgccttggagaaagtccaaggacggcaagatggaatttctgttccaagagtccttcgacgagatgctggccgagttcaagcagcaccatcctcagctgctggccaatggcaagaaggtgccctacgactggaccatctactacctgcggaagaaggccctgacacagcggatcacaaaagaggaactggcctggattctgctccagttcaaccagaagcggggctactaccagctgagaggcgaggaagaggaagagaaggccaacgagacaatcgagatcatcagcgccaagatcctgagcgtcgagaagaaagagaaggacaagaagtacgagaagtattggtacgagatgcacctcgagaacggcatgacctaccgggccaccttctacaacgatgtgacaagctgggagggcgagacaaaggacttcgtgctgaagcggacaaccctgaaggatggcacccctaagaacgagctgagcttcctgcctacacctgaagagatcgacctgatggacgcccagcggaaggccaagatgtatgccaagatcaagctgcggaccgagaaagagattgagaacagccacaagaccgtgggcagctacatctacgacagcctgctgcagaaccccaatcagaagatcatcggcaagctcgtgcggaccgtggaaagaaagttctacaaggacgagctgaagaaaatcctcgaggtccagcaagagctgatccctgagctgaaggacgaggccctgtaccagagatgcatcgaggaactgtatgccgccaacgaggcccacagaagaagcctgagcaagcccgactacgtgaacctgttcctgaacgatatcctgttctaccagcggcctctgaagtccaagaagtccctgatcgacgactgcccctacgagtaccacgtgtccaaagatggcgagcagcaccccatcaagtgcattgccaagagcaacccctactttcaagagttccggctgtggcagttcgtgcagaacctgcggatctaccagagggaaagaaccgtgaccgatggccagctggacctgttcaccaacaccaccaccaacaagctgcagacagacgtggacgtgaccagcgagatcctgaaaaccgaagaggattacgtcaagctgttcaactggctgaacgacagaagcagcatcaagcaggacaccctgctgagcagctacttcaaggccaaaaaagagaaaggcaaggataagtacccctaccggtggaactacgtcgaggacaaggactacccctgcaacgaaaccagagccaccattctgtctggcctggccaagtgcaacatctccgccgattttctgacccacgagaacgagatgtccctgtggcacatcctgtactccatcgaggataaggccgagctgtacaaagccctgaagaagttcgcccaccggcaccagctggaagagaattttcctgaggtgctgagcaagacgaagcccttcaagaaggactacggcagctactccgagaaagccatcaagaaactgctgcccctgatgcggatgggcaactactggaacgaggaacagatcgacgccaagaccagagagcggatcgagaagattatcgacggcgagtacgacgagaacatcaagaacagagtgcgcgaaaaggccatcagcctgacagacatccagcactttagaggcctgcctgtgtggctggcctgctacatcgtgtacgatagacactccgaggccaaggtggtggaaaagtgggagaagcccgaggacatcgattactacctgaagaactttaagcagcacagcctgcggaaccccatcgtggaacaagtgatcaccgagacactgagaaccgtgcgggacatctggaagcaagagggccagatcgatgagattcacgtggaactgggcagagagatgaagaaccccgccgacaagcggagacagatgaccgagagaatccagcagaacgagaacaccaacctgagaatcaaggccatgctgatggagttcatgaatcccgacatgggcatcgagaacgtgcggcctcatagccctagccagcaggacattctgagaatctacgaggaaaacgccctggacaacctgagcaaagaggacaaagattacgacttcgtgtccaagatctccaaagtggcccagcctagcaagagcgacatcatcagatacaagtgctggctcgagcagaagtatcagagcccctatacaggcaagatgatccctctgtccaagctgtttacccctgcctacgagatcgagcacgtgatccctcagagccggtacttcgacgactccttcagcaacaaagtgatctgcgaggccgaagtgaacaagctgaaagaccggcagctgggcttcgagttcatcaagaatcacgccggcgagatcgtgcagctgtctcaaggcggaacagtgaccatcatgagcgtggaagcctatgagcgcttcgtgaaggattactacagcaacaaccggaccaaaatgaagaaactcctgatggatgacatccccgacggcttcatcgagcggcagatgaacgactcccggtacatctctaaggtggtcaagggcctgctgtccaacatcgtgcgcgagaaacaagaggatggcgagtaccagagcagcagagagtatgagcaagaggccgtgtctaagaacgtgatctcctgcaccggctccatcaccgacagactgaagaaagactggggcatgaacgacgtgtggaacaatatcgtgctgccccggttcaagagactgaacgaagtgaccggcaaggactgcttcaccacctactctagagagggccacgagatccccaacatgcccctggaactgcagaagggctttaacaagaagcgcatcgaccacagacaccacgccatggatgccatcgtgattgcctgtgccaccagagatcatgtgaacctgctgaacaacgaggctgcccacagcaagcacaacgtgaacagatatcagctgcagcacaaactgcggagattcgccaccatcaagatcaacggaaaagagagagagatcgcccaagagtttctgaagccctgggagagctttaccaccgatgcttggcaggtcctgagcaacatcatcgtgtccttcaagcagaacctcaggatcatcaacaagaccaccaaccgctaccagcactgcgaggacggcggaaagaagggattcgagaaacagcacaagggcgagtcttgggccgtgcggaagtctatgcacaaggacaccgtgttcggcgaagtgaatctgcggctgaaaaagaccgtgtctctgaacgaggccattaagaaacccgagaatatcgtgaacaaagagttcaagaagaaagtcatcgagctgctggaccacggccgggacgccaagttcattaagaagtacattgacgacaacaaggacgtttggagcgatatcaacccagccaagatcgagatcttctacttcagcaaggatgagaagaagcggaacggcgagcctaaagagagatacttcgccactagaaagagcctggacaccaccttcgatgagaaaaagatcaaagagagcgtcaccgacaccggcatccagaaaattctgctggcccacctgaccaccaaagagaacaatcccgagcaggctttcagccctgacggcatcgaagagatgaaccggaacatcacagccctcaacaacggaaagttccaccagcctatcctgaaagtgcgggtgtacgaaaaagccgacaagttcgctgtgggccagaccggcaacaagacaaagaaatttgtggaagccgccaaggggaccaacctgttctttgccttcttcggcacagagaaagaaatcaagagcaatggccgcaaagagatcgtccggtccttcatgacaatccctctgaacgtgatgatcgactgccagaagaaatacggaatccagtggcggaacaacatcgaggactatctgcggggcaaagacatgatcgatgccgatgccaagctgctgttcattctgagccccaacgacctggtgtacctgcctagagagaacgaccggaaagaggatatcatgcctctggacaagcagcggatctataagttcattgaccccgcacaggataagggcaacttcgtgcagtatagcgtggccaaggccatcttctccgccaagtttaccgaccagaaaaagcagggcatcagctaccctatccaggacgagtttggcctgggcagccagcagacaaagagccctagagccatcaccggggagatgatcaaagaaacctgcattcccatcaaggtggaccggctgggcaacgtgatcgagattaacggcagccctctgggatcc

SEQ ID NO: 227 - DNA, 4557 bp, Artificial Sequence
  OMNI nuclease sequence
ggtaccaagaccatcctgggcctcgatctgggcacaaattctatcggctgggccgtcgtgcaagagaaggacaacgagatctacaagtacctgaaacaggtgctcggagccggcagcagaatcatccctatggatgctgctcagctgggcgacttcgccaagggcaataccatcagccagaccaaagagcggaccgagtatagaggtggcagacggctgagagagcggtgcctgctgagaagagagcggctgttcagaatcctggacatcatgggctttctgcctccacacttcgccgaggaactgaccagatacggcaagttcaagaacgccgacaaagagcccaagatcgcctggaagaaggataacgaaggccggatgggcttcctgttcgtggaaagcttcaacgagatgctgaaggacttctccaccacctatcctgacatcctgaagaacggcatgaaggtgccctacgactggaccatctactacctgagaaagaaggccctgaccaacgccatcacacctttcgagctggcctggattctgctcaacttcaaccagaagcggggctactaccagttcagaggcgacgaagaacaggccgagacaacgaagtacgaggaatatctggcccagaaagtggtggacgtgatcgacacaggcgagaaaaagggcaagagcacttggtttgacatcgtgctggaaaacggcatggtgtaccaccggcctgccgataccaagcctgattggatcggcaagacaaaagagttcatcgtcaccacacctctggacaaggacggcaaccccaagaaagacaagaaaggcaacatcaagatgagcttcagaatgcccagcgaggacgactggaacctgcagaagaagaaggccgagaaggatatcgacgagagcggcatgacagtgggcgagtacatctatgacgccctgctgcacaaccctaagcagaagatcaagggcaagctcgtcagagtggtggaacggaagtactacaaggacgagctgcggaagatcctggaatctcagaagcggttcatccctcagctgaccgacacagccctgtacaacaagtgcatcgaagaactgtaccagagcaacgaggcctaccggaacagcatcagcgccagaaacgacttcagctacctgtttgtggacaacgtcatcttctaccagcggcctccaaagagcaagaagtccctgatcgacaactgcccctacgagagccacctgtacatcaaggatgacaaagagtacaaggcccctgtcaagtgtatcgccaagtctcaccctctgtaccaagagttccggctgtggcagttcatcagcaacctgcggatctaccagagacagatgcagatcggcgacaaagtgaagctggatgtggatgtgaccaaccagtacatccccaccgaggaaagcagagaggccctgttcgactacctgaacgaccggaccgagatcaagcaggacaccctgctgaaagatttcttcaacatgaagaagcccaagaacaaagacggcgtgttcccctgcagatggaactacgtggaagataagagctacccctgcaacgagacacggggcaagatcattgccaacctgaagaaagccggcctgagcagcgatttcctgagcaacggaaacaacgaagaggctctgtggcacatcctgtacagcgtcgaggataaggatgagctgagaaaggccctggccagattcgccgccaagaacagcctggacgatagattcacagaagccctggccgacatcgagccctacaagaaagagtacggcgcctacagcgccaaggctctgaaaaagctgctgcccctgatgcggctgggcagatactggaactacaaccacatcgacaccgagacacaagagcgcgtgaactgcatcatcaacggcgagtacgacgagtccatccggaacagagtgcgggaaaagacaatcagcctgacctccgccacacagtttagaggactgcctctgtggctggcctgctacatcgtgtacgacagacacagcgaacgggccgaaacaggcaaatggtctagccccgaggacatcgatgagtacctcaacgatttcaagcagcacagcctgagaaaccccatcgtggaacaggtggtcaccgagactctgagaacagtgcgggacgtgtggaagaagcacggcaagattgacgagattcacgtggaactgggcagagagatgaagaaccccgccaacaagcggaacgagatgaacagacggatgctcgagaacgagaacgccaacatcagagccaaactgctgctgaccgagtttctgaaccctgagctgggcatcgagaacgtgcggccttattctcctagccagcaagagctgctgagactgtatgaggacggcgccatcagcaatgccggcaacgatatcgatgacgagatcagcgacatcatcggcaagctgagccaggtggacatcaagaagcagcccaccacaagcgaagtgaagcggtacatgctgtggctcgagcagaactatagaagcccctataccggcgagatgatccctctggccaagctgtttaccagcgcctacgagatcgagcacgtgatccctcagagccggtacttcgacgacagcttcagcaacaaagtgatctgcgaggccgaagtgaacaagctgaaggatcggatgctgggctacgagttcatcaaacagcacaagggcgagaaggtgcagctgtccatgggcagaaccgtggaaattctgagccccgaagagtacgtgcggcacgtggaatcccagtacaagaacaacaaagtcaagatgcggaagctgctgatggacgacatccccgacgagtttatcaaccggcagctgaacgacagccggtacatctccaagctgatcatcagcctgctgtccaacatcgtccgcgaagtgggagaagaggaagccaccagcaagaacgtgatcagctgcaacggcgctatcaccgacagactgaagaaggactggggcatcaacgatgtgtggaaccacatcatcctgcctagattcgtgcggctgaacaaactgaccggcaccgacaagttcaccaccgtgaacaaagagggccacgaggtcccaaccatgcctctggaactccagaagggctttaacaagaagcggatcgatcaccggcaccacgccatggatgccatcgtgattgcctgcaccaccagggaccatgtgaacctgctgaacaatgaggccgccatgagcaagaacaatgccaatagaatccagctctccaagaagctgcggcgctacgagacagtggaagtggtcaaggacggaatgagaaagcagatcagcgtggccaaagagtttaagaagccttgggacagctttaccaccgacgtcgagcagatcctgaagggcatcgtggtgtccttcaagcagaacctgagagtgatcaacaagaccaccaattactaccagcacattaaggatggcaagaaggtgttcagcccacagagcaaaggcgacagctgggccatcagaaagcctatgcacaaggacaccgtgttcggcgagatcaacctgaggcggattaaggacgtgtccctgaaagaagccatgaagcaccccaaggacattgctgacaaagaactgagagagaagatcctcgagctgatggctctgcagtacaacgagaagaagattaagctgtacttcgatgagaacaaggacgtttggagcgacgtgaacaccaagaagatcagcatctactttttcaccaaagagacaaacgagcggttcttcgccaccagaaaggtgctggacaccagcttcgacaagaagaaaatccagacacaggtggccgacaccgccatccagaaaatcctgctgaagcacctgagcgcccacgaggataatgccgagatcgccttctctcctgacggcatcgacgaaatgaaccgcaacatcatcgagctgaatgacggcaagtgccaccagcctatgttcaaagtgcgggtgtacgagaaagccgagaaattcgccgtgggccagcagggcagcaaaaagaaaaagtttgtggaagccgccaaggggaccaacctgttctttgccatctacgaggaagaacagatcgataacaagaccggcaacgccgtgatggtccgaagctttgacacaatccctctgaacgtcgtgattgaccgggaaaagcacggactgagccctgctccagagaacaagaatggcaccaagcctaaatacgtgctgagccccaacgacttcgtgtacgtgccaacagaggaagagaaggccaccggccggatcagaaaactgctcaacaaagaacgcatctacaagatggtgtcctgtaccggcaaagaatgctacttcgtgccctacagctccgccaagcctatctacgacaaggtggaatacttcagcctgaacaagatgggcagagccctgagcggagagatgatcaaagagatctgcattcccctgagcatcaaccggatcggagagatcaccatctgcgagggatcc

SEQ ID NO: 228 - DNA, 4452 bp, Artificial Sequence
  OMNI nuclease sequence
ggtaccaagaacatcctgggcctcgacctgggcaccaattctattggatgggccgtcgtgaccagcaacgacaacaccaatgagaagccccaggtggaactgggcagcagaatcatccctatgagccaggacgtgctgggcaagtttgatagcggcgtgacacagagccagaccgccgagagaacaggatacagaggcgccagacggatcagagagagatacctgctgcggcgcgagagactgttcagagtgctgcacattctgggctttctgccccggcactttgaagagagcatcggctgggacaagaacgataacaagacctacggcaagttcaaggacgacagcgagcctaagctggcctgggacgatagcgacaagaacaacaaccacttcatcttcgtggacagcttcaacgagatgctggaagagttcaagaagaagaaccccagcttcatcagctccgacaagaagatcccctacgactggaccatgtactacctgagagacaaggccaccagacagcccatctctaagcaagaactggcctggatcatcctgaacttcaaccagaagcggggctactaccagctgagaggcgaggacgaggaagagaacaccaagcacaagaccgaagagtactacgagctgcggatcgacagagtggaagccaccaacgagaagagaggcaacgacatctggtacaacatctacctggaaaacggctgggtgtaccggcggtctagcagaatccctctggaagattgggtcggaaagaagaaagagttcatcgtcaccaccgagtacaacgaggacggcagcatcaagctggacaaggacggcaacgaaaagcggagcttcagagcccctaaggacgatgattggggcctgcagaagaaaaagaccgagttccagatcgacagcagcgagcagaccgtgggctccttcatctacaaccatctgctggccaatcctaccgagaagatcagaggcaaggtcgtgcggaccatcgagcggaagtactacaagcaagagctgggaaagatcctggccaagcagaaggacttcatccccgagctgagcaactctgccctgctggaacagtgcatccacgagctgtatgccaacaacacagcccaccaggactccctgcggaagaaggacatcaactacctgatcatcgacgacatcatcttctaccagcggcctctgaagtccaagaagtccctgatcgccgactgtccctacgagcagtacgagtacatcaacaagaacaccggcgagatcaagaaacagcacatcaagtgtatcgccaagagcaacccctactaccaagagttccggatctggcagttcatccagaacctgcggctgtactccaacgacctggacaacaccgacgtgaccaagaactatctgaagaacgaagaggattacgtgcacctgttcaagtacctcaacaacctgaaagagatcagccaagaaaccctgctcaaggacttctttagcatcaagaagcccaagggcaaagacagcatctaccccgtgcggtggaactacgtggaagataagaagtacccctgcaacagcaccagataccagatgctggccgctctgaaggacgccgagattcccgacacactgatcgacaaccggaataccgagtaccggctgtggcatctgctgtactctgtggaagatcggaacgagctgattagcgccctgtgcagcttcgccagagacaacaagctgcccgagagcttcgtggattgctttaagaagattcccagctacaagaaagaatacggcgcctacagcgagaaggccgtgaagaaactgctgagcgtgatgagagtgggcagcctttggagcgaggacaacctgcctaacaacatccacaacgtgatcaacggcaccatcgacgagaaagtgaagaagcggatcgagcacaagggattctttctgagcgagaagcagagcttccggggactgcctgaatggctggcctgttacgtggtgtacggcagacacagcgagacaagcgacatctccagatgggagacaccccaggacctggccaacttcatccacgactttaagcagcacagcctgcggaaccctatcgtcgagcagtgtatcctggaaaccctgagaaccgtgcacgatatctgggtccgacacggcagaatcgatgagatccatgtcgagctgggccgcagcatgaagtctacagccgagcagcgggaaagaatgagcaagaccatcattcagaacgagaataccaacctgcggatcaagaacctgctgctcgagctgaagaatgactccaccatcaaggacgtgcggccttacagccctatgcagcaggatctgctgagaatctacgaggaaggcgccctgctgaccctgaagagagatgacaaggactacaacgagatctcccggatcagcaagctgagcgcccctacacagagcgagctgaccagatacaagctgtggctcgaacagcggtacagaagcccttacaccggcaagacaatcagcctgagcaagctgttcacccctgcctaccagattgagcacgtgatccctcagggcagatacttcgacgacagcttctccaacaaagtgatctgcgaggccgaagtgaaccagcggaagtccaatatgctgggctacgagtttatccagaagtgtggcggagagatcatccactgtgctaccctgggagatgtgaaggtgctgaccgccaaagagtacaaggatttcgtcagcgaccactacgaccccaagagcagcaaggcccagaaactgatgatggacgatatccccgagacattcatccagcggcagatgaacgacacccggtacatctctaaagtgatcaagtccctgctgtccaacatcgtgcgcgagaaggacgagatcgacgctatcagcaagaatgtgatcccctgcaccggcggcatcaccgagaggcttaaaaacgactggggcctgaagcacgtgtggaactctatcgtggcccctcggttcatcagaatgaaccagctgaccaacagcgaggccttcggccactgggagaacaaggatggcaagcgggtgttccagaccaccatgcctatcgagctggaaaagggctttagcaagaagagaatcgaccaccggcatcacgccctggatgccctggttattgccctggcctccagaaacatcatctcttacctgaacaacgagagcgccagggacaccaatcggagagaggatctgagaaggctgctgtgcgataagaaccggatcatccggaagccttggaacacattcacccaggatgcctacgtggccctgcagaacatcgtggtgtccttcaagaactacgtccgagtgatcaacaaggccagcaactactatgagcactacgacgagaacggacggaagaagccaatcgcacagaaaggcgaggaacagtgggccatcagaaagcctctgcacaaagaaaccgtgttcggccaagtgaatctgcagcggaagagagaggtgtcctttgccaaggccatcgaacaggtgtcctgcatcgtggataaggacctgcggaataccatcaagagcatgatcaaggccggcatggacgagagccagattcggaagcacttcaaggctcagaacaatatctacgccggcaagagcattaacaaggtcgaggtgtactactacaccgacagcgtggaacccatggtggccacaagaaagctgctggacgactccttcgatgagaagaaaatcctgtccatcaccgataccggcatccagagcatcctgctgaattacctggaagccaagggaaacgatcccaagctggctttcagcccagagggcatcatggaaatgaacgagaacattgccaagtacaacaacgggaagttccaccagccaatcatcagagtgcgggtgtccgagccaaagggcgagaagtacaatatcggcaccaccaagaacaaagccaagaagttcgttgaggcccagagcggcaccaacctgttcttcgccatctacgagacagagaacggcaaccggtcctacaagaccattcctttcaaccaggtggtcgagcggatgaagatgggatggacacccgtgcctgagaagaatgagaacggcgacaagctgaagttctatctgagccccaacgagctggtgtacgtgcccactgaagaggaacggatgagcaacagcatcaatatcaacaaagaccggatctacaagatggtgtccgccaccggcaatcaggtgttctacgtgcggcacaatatcgcctccgtgatcgagaacaaagtggaactgcagagcctgaacaagatggaaaagaccatggaaggcgagatgattaagtccatctgttggaagctggaagtggaccggctgggcaacatcaccaacatcatccggggatcc

SEQ ID NO: 229 - DNA, 4347 bp, Artificial Sequence
  OMNI nuclease sequence
ggtaccaagagaatcctgggcctcgacctgggcaccaattctatcggatgggccctgatcgacggcgagaagaacacaatcatcaaggccggcagccggatcatccctatggatgccaaggccatgagcgagtacgagacaggcaatctgcagagcgccacaagcgtgcggacagactttagaggcaccagaaggctgtacgagcgggccgtgctgagaagagaaagactgctgagagtgctgaacgtgctgggcttcctgcctgagcacttcaagaaccagatcgacttcgagaagcacctgggccagttcatcaatcacggcgagcctctgctgccctacagaagaaccgaggacaacaagaacgtgttcatcttcgccgacagcttctacgagatgatcgccgacttcagcctgcatcaccccgagctgacagagaacggcaagagagtgccctacgactggaccatcttctacctgagaaagaaggccctgagcaagcccatcaagaaagaggaactggcctggctgatcctgaacttcaacaccaagcggggctactaccagctgagaggcatggaaaacgagacaaagaccaacgacggcgaagagtacaagatcctgaaagtgatcgacgtggaaaagacgaacgaggacaagaagcggaagggcatcttttggtacgagatcacctacgagaacggcgccaagcagagaaagtctggccctgtggctcccagaaagatcggcgacatggtggaagtgatcgtgaccaccagctacgacaaggacggcaacatcaagaccgacaaagagggcaaccccaagatcagcatcagcaccccatctgccgatgagtggaagctgctgaagaagaagtccgagaacgccatcaaagaaagcggcaagaccgtgggcgagtacatctacgacgagctgctggtcaaccctaacatcaaagtgaagggcaagctgatccgcgtgatcgacagacccttctacaaggacgagctgaagcggatcatcgacaagcagagcgagttcatccctgagctgcgggacagatccctgtacgagaagtgcatcagagagctgtaccaccagaacgaggcccacgtgcagagcatcatggacaagagcttcaccgacctgttcgtcgaggacatcatcttctatcagcggcccctgaagtccaagaagtctgagatcgctaactgccccttcgagaactaccactacatcgacaaagaatccggcgagatcgtgaacaagcctatcaagtgtatccccaagtctcaccctctgttccaagagttccggctgctgcagttcacccagaacctgaagatctttaagcgcgagaaggtggtcaacgggaagctgaaaaccgacgtggacgtgaccagcgactttctgagcaccctggaagattacgccgctctgttcgagtggctgaacaacaaaaaggacatcaacgaaaaagagctgctgcgctaccccagcttcaacatcggcaagaatgtgtccgagtaccggtggaactacgtcgaggataagagctacccctgcaacgagacacactacctgatcaacagacagctggacgacgtgggcacctctctgacccctgatcaagagtgtgctctgtggcacatcctgtactccgtggacgacatcatcctgctgcggaaggctctgaagtccttcgccaagaagtacgacatcaacaccgagctgtttgtcaaggccttcgagcacatcgagcccttcgacaacgattacggcgcctacagcgagaaggccattaagaaactgctgcctttcatgcgcaagggcatgagactgcacgatgcctgttacgaggtgtacggcagattcagcgagacagccgacaccgacaagtggaccacacctgaggacatcgacagatacctcgagttcgagttcaagcagcacagcctgagaaaccccgtggtggaatctatcctgggcgagacaatgagagtcgtgcgggacatctggaaaacctatggcgagatcagcgaggtgcacgtggaaatgggcagagatctcaagaagtccaatcaagagcggcgggacaccaccgaccggatcagaaagaatgagcagaccaacctgcggatcagactgctgctgcaagagtttctgaaccccgagtataagatcgatggcgtgcggcctcacagccccagccagcaagagattttcaagatcttcgaggaaaacgccctggccaacatcaatgaggacgccgagagcgacgacatccagatgattgccgataacctgggcaaccctagcaagcacgtgtcccagtccgagatcatgcggtacagactgtggctggaacagaagtacaagagcccctataccggccagacaatcccactgtccaagctgtttaccaccgcctacgagatcgagcacgtgatccctcagagccggtacttcgacgacagcctgtccaacaaagtgatctgcgagagcgaagtcaacaagctgaaggaccggatgctgggctacgagtttatcacaaagcacggcggagagatcatccagggcaacttcggcacccagatcaagattctggacaagatccagtacgaagagttcgtgaagcagcactacgccagcaacaagggcaagatgaagaaactcctgatggaagatatccccgacaacttcatcgagcggcagctgaacgacagccggtatatcgccagaaagaccatcagcatcctgtctaagcttgtgcgggaagagaacgagacagaggccacctctaagaacgtgatcgtcacaaccggcaatatcaccgatcggctgaaaaaagaatggggcgtgaacgccgtgtggaacgacattatcgcccctcggttcatccggctgaacaccatcaccggcacacacaactacggcgagatgattaacagagagggcaagcagtacttccagatcaacgtgcccctggaaatcagccggggcttcagcaagaagaggatcgatcacagacaccacgccatggacgccatcgtgatcgcctgcaccacacggaatcacgtgaactacctcaacaacaaggccgcactgtcctccgagaaggacctgagatacgacctgcagcacaagctgtgcaccaaagtgaaaacagacgaccggggcaactacacctggcagttcaacaagccctgggagagctttacccaggacgttcggagagagctggcctccatcatcgtgtccttcaagcagaatctgcgcgtgatcaacaagatgaccaacttctactggcactacgagaatggcaagaaggtgctgacccggcagacaaaaggcgacggctgggccattagaaagagcctgcacaaagctggcgtgtccggcacagtcagactgcagaccaagaaaaccgtgaagctgagcgacgccctgaactgtgtgtctatgatcgtggacaaagagattcggaaagagatcaaggacgtcatctccacctacggcaagctctacgagaagaaaaccatcctgaagtactttaaggatcggaactacaaagtgggcaagaaagacgtgtcccgggtcgagatctactacacccctgagattgccgagctgagcgccaaaagggtgctgctggataccagcttcgacgaaaagaccattaagtccatcaccgacaccggcatccagaatatcctgctgaagcacctcgccaacaacggcaacgaccctaagatcgccttcacacccgagggaatcgccaacatgaacgaccacctgaaagaactgaacgatggcaaagagcacaagccgatcctgcgcgtgcggaaaacagagagcttcggcctgaagttccctgtgggcgaagtgggaaacaagagcaagaaatatgtggaagccgataagggcaccaacctgttcttcgccatctatatcgacgaggatggcaaccggtcctacgagagcatccctttcaatgtggccgtggaacggctgaagattggcgcacaggtggcccaagagattaacgaggaaggcaaaaagctgctgttcgtgctgagccctggcgacctggtgtatattcctgatgagggcgaacacgtcgacgatatcaccaacaacaaccggatctacaagatggtgtccgccagcggcagacagtgcttcttcgtgccctactatatcgcctctcctatcacctgtcctctggaactgggcgctaacaacaaagccgagaagaattgggatgacatcatgatcaagtccacgtgcgtgaagctccaggtggacagactgggcatcgtgactaagatcttccagggatcc

SEQ ID NO: 230 - DNA, 4353 bp, Artificial Sequence
  OMNI nuclease sequence
ggtaccagcaacaagatcctgggcatcgacctgggcaccaatagcatcggcctgagcctgagaaataccgagatcgtcggcggcatcaaagagcagctggaatacttcagcagcatcatcttccccagcggcgtgggcaagaacaagaccggcgaattttcttacgccgccgagcggaccaagaacagaagcacccggaagatctacaaagtgcggcggtacagaaagtgggagacactgaagctgctgatcgagaacgactgctgccctctgagcatggaagatctgcagaaatggtctaagtacgacaagatcaagggcctgaagcggcagtaccctatccacgccacacacttcgagcagtggatcagactggatttcgatggcgacggcaaggccgactacgcctctccatttgagctgcgggccatcctgatggaacggcagttcgatttcagcgagatgaccgaccggtacaagctgggcagagccctgtatcacattgcccagagaagaggcttcaagagcagcaagggcgaaaccctgaaagagcaagagcagaacgagaagggcgagctgcaagaggtggacatcacagacgccctgaagaagtccgaggaaaagaagtctggcaagctgaccgagtacatgaaggtgcacaatctgcctaccgtgggctgcgccttcaaccatctgctgaagaatggcatcagagtgcggaacagcgagtatcaggctgtgcggagccagtacaaagaggaaatcagctgcatcttcgagttccagaaaggcctggacaaagagagcgacttctacaagcggctggtgtccgagaagaaaggcgagggcaccatcttttacaagaggcccctgagatcacagaaaggcgccgtgggaaagtgcaccctggaacctaacaagcctcggtgccctatctctcaccccgagttcgagaagttcagagcctggtccttcatcaacaacatcaagttcggcgaggacctgagcgaggaactgaccctgaagcagaagaaggacctctacaaagagaagttcctgctgagccggaagtccttcaagttcgaagtgatcagagagtggatctgccggcggaccggcatgacactgaactacaagaacaaaaccatcaacttcaaggacagcaccagcgtgtccggctgtcctatctctggcagactgaaaagactgctgggcgacgactgggagtgctggaagctggaaagcacagagaagaagatcaacaagaaaaccggcgaagtgcggaagatcacctacgacgtgtacgacctgtggcacgtgtgcttcagcttcgatgaggccgagtacgtggacgacttcgccaagagcaagctgaagttcgacgacaaccaggccaagcagctggtggccatcttcaacgatatccagcagggctacagccagctgtccctgaaggccatccggaatatcaacatgttcctgcaagaaggcctgctgtacaacgatgccgtgctgctggccaagctgcccgatatctttggctgtagatgggaagaagccaaagagtacgtcgtcagccagatcgacagcattatcaaagagaaccggaaagagaagctgctctactctatcgccaaccagctgatcggcaactacaagtgcctgagctacgacgagagattcgccgaccacaacttcgactacatcctggacgacagcgactacaacgacatcaagaacgccattctgaacgtgatcggcgagaagaagtggtccaagaaggacacctccgagcagagcgagatcctgaatgatgtggcccagctgtatcagggcttcttcgcctctcctaagcgggactactacaagaccagaaaggtggcagatgccctggccgagttcctgagcggcaaatacgacttcctgcctaagaaagagctgaacaagatctatcaccccagcatgatcgagttctacagccccgccaaagaacagagactggacgacggaagatggctgaaactgctgggatctcccgtgatcggagccatgaagaaccctatggccatgagagtgctgcacaccctgcggaagagaatcaacgctatgctgatggaatccatgatcgacgccgacgacacccggattgtggtggaaaccgccagagaactgaacgacgccaacatgagatgggccatcgaggcctaccagcgcgagcgcgagaaagagaacaaagaatacgagaagattctgaaagagtactaccctggccggtccatcagcgacaaagaaatcgaccaagtgcggctgatgtgcgaccagcacgatatccccggcgacgataacaacaccgacatgggcagacgcaagaccgccaaaaacaagaaagaggtgccaccggtctacaaaaaggacgtgacccggtacagactgtggctggaacagggctgcagatgcctgtacaccggcaagatcatcaacatcaccaagctgttcgacgagaacgccttcgacatcgagcacacaatccccagatccatctccttcgacgatagcctgaagaatctgaccatctgcgacgcccactacaatcggagcgtgaagaaaaaccagatgcctacacagatggccaactacaaagaagatgccaacggctacaccgccatcctgcctagactgcagccttggatcgagaaggtggaacggctgaaggacaacgtggccttttggaaggcccagtccaagctgtcccaggacaaagaacggaaggactactgcatccggcagcaccacctgtgggtcatggaactggactactggaagggcaaagtggaacggttcaccatgaccgacgtgaccagcggcttccggaacaatcagctgaacgacaccaggatcatcaccaaatacgcctaccactacctcaagaccgtgttcgaccgggtgtcagtgcagaaaggcagcgtgaccgccaacttcagaaagatcctgagaatccagagcgtgaacgagaaaaagtccagagagaagcacagccaccacgccatcgatgccacagtgctgacactgatccccaacgccgagatgcgggacaagattatcaagaccttctactccatcaaagaacgcgagcggttcaacgaggacgccagcgctctgaagaaagaactggctaaagaactgaagaactgccagctgcctagcaacatctctgagatcgtgcccttcatcgaggacaacatcctggtcaaccacatcagcaaggaccagacactgacccctgctcacagacggaagcggatcagaggcaaaatcgtgcccaagcgggacgagcacggaatcatcctgtacgagacaaacgccgatggcaccaccagaaagaacaagcacggacaccccattcctcaggccaaagaatggatctctggcgacagcatcagaggccagctgcacaaggatagctttttcggcgccatcacacagtggctgaaagataacaacggcgagaaagtgctcgacaagaagggcaacatcatctccgacaccaagatctactacgtgatccggcgcatcctgaagtacaagtccagcgacaccgacagcggctttaagaactgggaagaactcaagagcgtgatcgtggacaaggacctgtttatgatcatgaagaatcagttccccgagaacaccagcttcaaggatgcctgcgagcacgggatctacatgtataagaacaacaagagcggcatcctcgacttcagcgacgagtgcaaactgaccaagatccggcacatcagatgctttacctccgtgaagaatcccctggccatcaagagccagacctacctgagcaccaagccttacaagcagaaatattacgccgatatgggcgacctgtacgccatgtgcagatacgagagcgtggacaaaaaagagcgcgagtaccagctgttcagcctgttcgacatctccaagaatcggaagctgggcctcgaggacatccctaccacaatcgagagcaagaagaaccaccggctgttcctcatccacatgctgaaaaagggcaatatgctgctggtgtacaatgacagcgaggaagccctcaaagaaaaggacaacaaggccctgctccagcacctgtatgttgtgcggggcttcgagaatgacggcaaccggatcatcctgcagaaacacgtgaacgcacagcaggacaaggatctcggaaagggcgagtctgtgaagggcagccaccaaatgcctgagaagatcagatgtggcatcaataccatcaagtacctgctctgcggcatcgacttcaagatcacccctaaaggcgtggtgttcgtgggatcc

SEQ ID NO: 231 - DNA, 4545 bp, Artificial Sequence
  OMNI nuclease sequence
ggtaccgacgagaagagacacatcctgggcctcgacctgggcacaaattctatcggatgggccgttgtgggcgagacagtggacaacgtgggcaacagaaagatcgaggaaatcatcgacgccggcagccggatcattcctatggatgccgccatgcagagcgacttcgccagaggcaatagcatcagccagaccgccgaccggacaagatatagaagcgtgcggagactgagagagcggtgcctgctgagaagagaaagactgcatagagtgctggccctgatgggcttcctgcctaagcacttcagcgacaacctgaccagatacggcaagttcaaggacgacgtggaatgcaagctggcctgggccaacgatgataatggccagcctgccttcgtgttcaggcggagctatgatgagatgctgcagctgttctggcaggttcaccccgagctgatgaagcagggcatgaaggtgccctacgactggaccatctactacctgagaaagaaggccctgaccgaggccatcagcggagaagaactggcctggattctgctgaacttcaaccagaagcggggctactaccagaccagaggcgaggaacaagaagaggacaagaccaagaaagaagagtactacgccctgagagtggtggacgtggtggataccaatgagaagaggggcagagacacttggtacgacgtgcacctggaaaacggcttcgtgtaccactgcaagagcaaagagaagcccgactggatcggcaagatcaaagaatttgtcgtgaccacacagctgaacgaggacggcagccccaagaccgataaggatggcaaagagcggcggagcttcagaatgccctctgagaatgattggggcctcgtgaagatcaagacccaggccgatatcgagaagtccggcaataccgtgggcacctacatcttcaacgccctgctggccaatcctaagcagaagattaagggcaagctcgtgcggaccatcgagcgggacttctataagtacgagctgtgcgccatcctgaactctcagaagcggttcatccctcagctgcaggacaacaacctgtacgaggactgcatcgaggaactgtaccagcagaacaccgcctaccggaacagcatcagcagccacgacttcacctacctgttcgtggacaacatcatcttctaccagcggcctctgaagtccaagaagtccctgatcgacgagtgcccctacgagagccacgtgtacatcgacaaggacggcaacacagtggaaaaccacgtgaagtgtatcgccaagagcaaccccatgttccaagagttccggctgtggcagttcgtgtccaacctgaagatctacgagcaccagaaggacgagaacggcagaatcctggaagataaggacgtgacctgcatgttcctggccgacgaacatagcagagccgctctgtttacctacctgaacgacagaagcagcatcacccagaaagagctgctggaaaagtacttcaacatcaagaagccccggaacaaggacgccgagatgccctacagatggaactacgtcgaggacaagcagtacccctgcaacgagacacggggcgagatcatcaagagactgagcaaggccggcatcgacaccgactttctggatcaccaggccgagatgagcctgtggcacatcctgtacagcgtgaacgatcggctggaactgcacaaggccctggaaagattcgcccagagaaatgacctgggctccgcctttgccggcatcatgagcaagttccctccattcgagagcgactacggcgcctactctgagaaggccatcaagaaactgctgcctctgatgcggatgggcgactactggcacgaggaagatatcgataagagcaccctggctcggatcaacaagatcatcgatggcgaggtggacgagagcatcagcgagaggaccagaaacaaggccatctctctgaccaacgtgaacaacttcaagggcctgcctctgtggctggcctgctacgtggtgtacaatagacacagcgaagcccaggacaacgacagatgggagaagcctgacgacatcgacgcttacctgaagaagttcaagcagcacagcctgcggaaccccgtggtggaacaggttgtgaccgagacactgcgggtcgtgaaggacatctggaaaacccacagccacatcgacgagattcacgtggaaatggggagagacatgaagaaccccagcgacaagcggaagaagatgaccgagagagccatcgagaacgagaacgccaacctgcggattaaggctctgctggccgagtttctgaaccccgagttcggaatcgagaatgtgcggccttacagccccagccagcaagagatcctgagaatctacgaggacacagccctgaactccgtggacgagcccgacgactatatccaagagatcgtgaacaagtttacccagagcgacgtgaccaagcggcctaccagatctgaggtgctgagatacaagctgtggctcgagcagcactacgtgtccccatataccggccagacaatccctctgagcagactgttcaccaccgactacgagatcgagcacgtgatccctcagagccggtacttcgacgacagcctgagcaacaaagtgatctgcgaggccgccgtgaacaaactgaaggacaatagcctgggctacgagttcatcctgaagcaccacggcgagatcgtggaactcggaggcggaaagagagtgcagattctggaagccgatagctactgcgccagcgtggaacggacctacaagaacaaccgggccaagatgaagaaactcctgatggaagatattcccagcgagtttatcgagcggcagatgaacgactcccggtacatctctaagctggtcaagggactgctgagcaagatcgtcatggaagaggacgagcaagaggccaccagcaagaacctgatcgtgtgtagcggcagcgtgaccgacagactgaagagagagtggggcatcaacgacgtgtggaaccacatcgtgctgccccggttcatcagaatgaacgagctgaccggcaccgccagattcaccacaacatctagcagcggccacctgattccagacatgcctctggaactccagaagggctttaacaagaagcggatcgaccaccggcaccacgccatggatgccatcgtgattgcctgcaccaccagagatcatgtgaatctgctgtccaatgaggccgcctctcctaagagcaacgccaacagacaccagctgagccacaagtttcggagatacgaaaccgtgaaggtggaaaaggacggcgaagtgaaaaccatcagcgtggccaaagagttcatcatgccttggcctagcttccccaccgacgtcgagaaggtgctgaatgacatcgtggtgtccttcaagcagaacctgcgcgtgatcaacaaaaccagcaatcactccctgcgctacgtggacggcaagaaaaagatggtcaagcagactgccggcgacagctgggccatcagaaagtccatgcacaaagaaaccgtgttcggggaagtgaacctgagattcgtgaagtcctttccactgagcgaagccatcaagcggcccaaccggattctggacaaagagctgaaagaaaagatcaaggccatggttaagctcgagtacaccgagaagcagattaaggcctacttcaaagagaacaaagacgtttggagcgacatcgatctgaagaaaatcgacatgtactacttcaccaaagagacaagcgaccggctgttcgccacacggaagaacatcgataccagcttcaacgagaaaaaaatcaagggcgagattaccgacaccgccatccagaaaatcatgctgaaccacctggccaaatacgagggcaagtccgagttcgccttctctcccgacggcatcgatgacatgaaccggcacatcaaagaactgaacggcggcaacgaccaccagcctatctacaaagtgcgggtgtacgagaaggccgacaagtttgctgtgggccagaagggaaacaaaaagaccaagttcgtggaagccgccaagggcaccaatctgttcttcgccatctatgagaacgaggtgctggacaagaaaacaggggagatgattaagaagcggtccttccggaccattcctctgaatgaggccatttctaagatgaaggccggactgcagctggacgaaaaggccgccttcatcctgtctccaaacgacctggtgtacctgccaaccgagaaagaactggaaagcggggagatctctcaccccatcgacaacagcaggatctacaagatggtgtccagctccaagttccaggtgtacttcgtgaaagtgaacgtggccgccagcatccaggacaagtgcgagtttagcgccctgaacaagatggaaagagccctgagcggagagatgatcaaagagatctgcatccccatcaaggtggaccggctgggccacatcattaagatcggcatcggatcc

SEQ ID NO: 232 - DNA, 3759 bp, Artificial Sequence
  OMNI nuclease sequence
ggtaccaacgtgctgggcctcgatctgggccctacatctattggatgggccctgattgagatcgagaacgacaacaaccccgtgtccatcctcggaatgggcagcagaatcatcccctacagcaatgacaccgccgccagcgactttagcaaaggcaagggcgagagcccttgcagcgagagaaccagatgccggcagatgcggcggaacatcgatagattccagctgcacagagagcagctgcggaacctgctgctgcagatcggcatgatcgacaagaacttcaaggcctctcctgcctctccactggaaatctggaagtccagagccgatgctgccacacctggcgtgaaactgcctctggataagctggccgccgtgctgttccagatcaaccacagaagaggctaccggcacagcaagagcgacctgggcgatagcaagcagacagagtacgtggccaagatcagcgaccggtacagcgagatcagacagacaggcaagaccgtgggccagtacttctacggcaagctgaaggacagcgaagtgatcaaccccaacggcacccggtactgcacctacagagtgaaagaaaaagtgtgccccagacaggcctacgaggaagaggtggacagaatcctgagcgtgcagagcgagttctaccccgatgtgctgaccaccgagaatcagaaagccatcaagcaagtgatcttctaccagcggcctctgaagtcctgcaagaacctggtgtccttctgcgagttcgagcggcaccagtttctgaacaaggccggcaagaaggtggaaagcggccccaaagtgacccctagaacaagccctctggctcaagtgtgccggatctacgaggccatcaacaacatcaagctggtcaacagccggcggaagcacaagaagtctgatagcgcccctagcctgttcgacgatcctgctgtgacaggcatggacctgcggaagttcaaagaggaataccccttcaccgacgaggaaagagagcggatcttccagttcctgaatacccacgagaagatgaccgagaaggacctgctgaagatcctgagactgaccagcgaggacggcttcaagtgtgacaagtctctcggcaagggcatccagggcaataccaccagatggcagatcgccaacgctctgggcaatcaccccgccaaagaagaactgctgagattcgacatcagcgaggaaatccccgccgagaatcccgatattgtggtgtctactggcgaggtgctgcccagaatcagcccttcttatgtgggccagcctttctacatgctgtggcacaccctgtacagcatcaacgacaaggacgagctgttcaaggtgctgagcgagaagttcggcatcaaggatgaggaaaccctgaaccggctgtacgccctggattttgtgaaggccggctacgccaacaagagcgccaagtttattcggaagctgctgcctctgctgaagcggggcatgatgtactctgatgcctgtgctctgctgggcgtgaaccacagcaacagcatgacaaaagaggaaaccatgagcagagagctgcagccccatctgacacctgtgctgaaaggcgaactgagacagcccgtggtggaaaagattctgaaccagaccatcaacgtcgtgaactccatcatcgacgagtacggcgagatcgacgaagtgcgcgtggaactggccagagaactgaagagagacaaagaaggccgggaaaagatggcccagaacatcaacaagaacgagcgggaaaacaaggccctgatcgaagagatcgccgacctgaacatcctgcctaccaggcggagaatccagaaaatgaagatgctgaaagaaaccggcaaccggtgcatgtactgcggcagacctgtgacaccctaccagtttatcgaaggccacggctacgagatcgagcacatcgtgcctagaagcagactgttcgatgacagcttcaccaacaaagtgtgcgcctgcagagagtgcaatagcgccaaaggcgccatgaccgccttcgatttcatgaagaccagaggcgagcaagagttcaacagctacctggacagagtcgagagcctgtacaaagagggcaagatctcccgcggcaagcgggatagactgctgatgtctgccacaacaatccccgacgacttcatcgagcgggacctgagagagacacagtacatcagccggaagtccatggaaatcctgtccgagagcatccggaatgtgcacgccagctctggcatggtcaccgatttctttagacacgcctggggctacgacaccatcctgcacgacatcaacctgcctagatactctgaggccggactggccgaggaagtggaatacgagacacacggacagaagcacgccgcctacagaatcaaggactggtccaagcggaaggaccacagacaccatgctctggatgcactggtggtggctctgacaagacagggctacatccagcggctgaacaccctgaacgccagcaccgagaacatcggcaacctggataagtgggctgccgagaggcctcacattgagagacaggccgttgtgaaagccctggaaaacgtggccatcagcttcaagtctggcaagaagctgacaacccctggcaagcggtacattagaagaggcggcagacggatctgtgtgcagacaggcgtgacagtgcctagatctcccctgcacaaggataccatctacggctgtatcagagtggacgacggcatgaagtccctgaagttcgccctgcagaatctgaacctgatcaaggataagggcatcagccagcagctggcctcctgtctccaagagaatggcggcgatatcggcaagaccctgaaggctctgaagaagaaccctctgaccatcaatggcacccctgtcgagaacgtggcctgctacagagaagagattgtggtcaagtacaagatcggcgccgtgaccagaaaggacgtcgagtatatcgtggacggccacatccgggaaatcgtgaaggccagattctccgaagtgggcaacagcgacaaagagttcgtcaagagcctggccgaaagacccctgtactccgatgaggcctgcagacaccagatccggaccatcagactgtttaccggaatcaagaagtcctctatcgccggcgtgcggaagaaagagtctggcgagatcatcggctacgctcagacccagaacaaccaccacgtggccttttacagaaaccccgacggcaaggtggtggaatccgtggtgtctttctgggactgcatcaagcggaaaaaagccggcctgcctgccatcatcaagaaccctgccgatgcctggaccatcctgatggctcagggcgagtctgagagcaccgatgagatcgccagaaccatgcctcctgacggcagcgcctttatcatgtccctgcagaggaacgagatggtggtgctgggcatgtctgacgatgaatggcgggatgccgtggccagcaaggatatcttcaccgtgaatcgctacctgtatagagtgtggcggctgagcaccggcgactactgcttcaagtaccacaccaacacaacagccgccatcggcgacggggacaaagagctgagacagtactaccggaccaccatcaccagcctgtttgctctgcaccccagaaaagtgcgagtgaccctgctgggaaagatcgacctgctgtccgacgacaaagaaaacctgatgctgggatcc

SEQ ID NO: 233 - DNA, 4182 bp, Artificial Sequence
  OMNI nuclease sequence
ggtacctactacctgttctacttcatcaagttcgtgcggcagaccctgaagatcagcatcatgaagagaatcctgggcctcgacctgggcgtgtcatctattggatgggccctcgtgaacgaggccgagaacgagaaagaaaagtccagcatcgtgaagctgggcgtcagagtgaaccctctgaccgtggacgagcagaccaacttcgagaagggcaagagcatcaccaccaacgccgagagaacccagaaacggggcatgagaagaagcctgcagcggtacaaactgcggagagccgagctgatcagaaagctgaaagaggccggcttcatcaacgacgacagcatcctgtacgagaacggcaacagaaccaccttcgagacataccggctgagagccaaggccgccacagaggaaatcaccctggaagagttcgcccgggtgctgatcatgattaacaagaagcggggctacaagagcaaccggaaggccaaaggcgaggatgagggaatgctggtggatggcatggaagtggccaagcggctgtacgatgaggatctgacccctggccagtattctctggctctggtggaacagggcaagaagtacctgcctgactactaccagagcgacctgcagaccgagctgcagagaatctgggacaagcagcagcctttctaccccgagatcctgaccaacgacctgtggaagatcctgcagggcaagtccaagacctacaccaagaagagattcgacctgtaccagatcagccctcctacactgaagcgcgacgaggccagaaaacagctgctgcagtggcgagtggatggcctgtctaagcagctgcccatcgaagtgatcagcgccgtggtgtctgagctgaacggccagatcaatggcacatccggctacctgggcaagatcagcgacagaagcaaagagctgtactttcggaagcagaccgtgggccagtacatgatggccattctggacaacaaccccaacgccagcctgcggaacatggtgttctataggcaggactacctggacgagttcaatcagatctgggagacacaggccaagtttcaccccgagctgacccaagagctgaagcacgacatcggcaacatcaccatcttctaccagcggcctctgaagtcccagaaaggcctggtgtctatctgcgagctggaaaagaagaagatcgagacaatcgtcgacggcaccaagaaagtggtcacagtgggccccaaagtgtgccctaagagcagccctctgttccaggacttccggatctggcagagactgaacgacctggaaatcatcgacaccgagacacgggcccaccggcctctggaacaagaggaaaaagagctgctggccaacgagctgagcatccgcgagaagatgacaaagcagcaggtcctgaagtgcctgttcaccaagacaaagggcctcgagctgaactttaaagagctggaaggcaacaccacacaggcccggctgtttgccgcctaccagcagatcatcgatatgagcggccacggcgagtacgactttagcaagatggccgccaatgaggccagagaaatcgtgggcagcatcttcagagccctgggctataagaccgacatgctgtgcttcgacgtggccctgaagggaaaagcactggaacagcagcccttttaccagatttggcatctgctgtactcctacgagggcgacaagtctgtgacaggcgacgcctctctgatcgccaagatcagagatctgtacggcttcgacaacgatgagtacgccaaagtgatcacccaggccagcttcaagcctgattacggctctctgtccgccaaggccatccggaacatcctgccttatatgatggccggcaacaagtacagcgtggcctgcgagtacagcggctatagacatagcgccagaagcctgaccaaagaggaactggctcacaaagaactgaaggacaagctggatctgctgccccggaacagcctgagaaaccccgtggtggaaaagatcctgaaccagatgatcaacgtggtcaacgagatcgtggccacctacggcaagctggacgagatcagaatcgagctggctcgggatctgaagcagagcgccaaagatagagaagaggccacaaacgccatcaaccaggccaccaagctgcacgaagagtacagaaagaccctgcacgacgagttccacatcgagcaccccaccagaagcgacatcctgcggtacaagctgtacatggaactgagcgccaacggcttcaagaccctgtacagcaacaccgccatcgtgcgcgagagactgttcagcagagactacgatatcgagcacatcatccctcaggccagcctgttcgacgactccttcagcaacaagacactggaactgcggaacgtgaacctgaagaagggaaacaccaccgccttcgacttcgtgaagaacgagtacggcgaggaagccagcaaggactacaaggccagaatcgacgacctgctgaagaacaagaagatctccagcgccaagcacgataagctgctgatgaccggcgaggacatccccaaggatttcatcaaccgggacctgcgggacagccagtatatcgccagaaaagccagagagatccttgaggacatcgtgcgggtcgtgaatagcaccaccggcaccatcaccgacagactgagagaagattggggcctcgtggacgtgatgaaggaactgaactggtctaagtacgaggccatcggacagatcgtgtcctgggtcaacagagatggcaataccatcagacacatcaaggactggaccaagcggaacgatcacaggcaccatgccatggatgccctgacaatcgccttcaccaagcactccatcgtgcagtactacaacaacatgaacgccagagccgacaagacctccgacatctacggcatcgagtgcaaagagatggaacggcacaacgaccacctgagattcaaggtgcccgtggaagggatgcgcgaagaagctaagagacagctgcagaatatcctggtgtccatcaagagcaagaccaaggtggcaacccggaacgacaaccggtctaagagcaagtctgctaaaggcggcgtgaaccacaaggtgcagctgactcctagggctcagctccacaaagagagcatctacggacggcggaggaagtacgagacaacctttgagaaagtgggcgccagcttcgacgcccagaagatcgccacaattgccagcaaagaaatccgcgaggccatgctgagaaggctgaatgagtttggcggcgacgccaagaaggcctttaccggcaagaactccctggaaaaaaagcccctgtggctgaacgccgaccactctagagctgtgcccctgaaagtgaaatgcgtgaccctggccgacttcttcaccattcggaagcccatctccaaggacctggtgctggaaaaagtggtggaccccaagattagagccctgctgcaggccagactggaagaatatggcggagatgccaacaaagccttctccaacctggatgagaaccccatctggctcaacgaggaacggggaatcgccgtgaagcacatcacaatcaacgccggcctgtacgaccctgagcctatccacgagaagcgggacagacagggaaagctgatcctggacaaagagggcaagcctatcgccgccgattttgtgcagaccggaaacaaccaccacgtggccatctttgaggacgccgatggcaagctgcaagagcacatcgtgtcttactacgaagccatggccagagtgtctcagggcgagcccgtgatcgactacaactacaacgtggaacttggctggcggttccggttcaccatgaagcagaatgagtacttcgtgttccccaccgatgagttcaacccagtggaagtggacctgaccaatcctgccaactacgccctgatcagcccacacctgttcagagtgcagaagctgtccaccaagaactacatgttccggcaccacctggaaaccagcgtcgaggacaagaaagaactgcgcgagatgacctggaagcggatcaccaatatcgagaagctgcgcaacatcatcaaagtgcggatcaaccacatcggccagattgtggccgtgggcgagtatggatcc

SEQ ID NO: 234 - DNA, 3789 bp, Artificial Sequence
  OMNI nuclease sequence
ggtaccaagatcctgggcctcgatctcggcatcggatctgttggatgggccctgatcgagacagacgacagcagaaaccccatccggatcatcgacatgggctgcagaatcatccccgtgtctcccgacgagacaaagaactttgagaagggcagcgccgagacaatcaacggcaagcggaccttcatgcggagcgcccggaagcggaactaccggtacaagatgagaagaagcctgctgaaggccacactgagcgccctgggaatgatcgaccagaaatctgaggtggccctgagatctctgagccccatgcaactgtggcagctgagagctgatgccgccacacctggaaagcagatcacactggctgagctgggcagagtgctgatgcacctgaaccagaagagaggctacagacacgccaagaccgacggcaacgatagcaagcagacacagtacgtgcagggcgtgaaccggaactacgccgatatcaaggacctgggcatgaccatcggccagtaccagtacagcaagctgaaagagagcgagacacacaccgccaagggctgcagtttcgtgatgcaccagatccgggacacagtgtaccccagacaggcctacatggaagagttcgacaccatcatgcaggttcaggcccggtactaccctgccatcctgacagatgaagtgatcgcccggctgcgggatatcatcttcttccagcggcctctgaagtcctgcaagcacctggtgtccatgtgcgagtttgagagccacgtggtgcacaagaaagccgatggatctgccgtgacagtgggacctaaagtggcccctagaacaagccctatcgctcaggccacaagactgtacgaggccatcaacaacatcaccatcgtgaacagcgccaaccggggcaacaaggacgtgaagctgtacgacgaggccgacttcttcaatggcgtggtgcccgtggctctgcggaagaaagattacgtgtaccggctgaacgccgaggaacggcagagaatcttcgactacctgaacaccaacgagaagctgaccgccaccacactgctgaagctgctgggcctgaagaaaagcgacggcttcgtgcctgataaggccatcggcagaggcatcaagggcaatgacacctacgtgcggattgccagcgctctgggcgattaccctggaaaagaggaactgctgaaattcgacctggacatcgtggactccggcgtggtcaatgccgattctggcgagatcctgagcatcgtgtccgccgatgtgatcaagcagcccctgtacagactgtggcatctgctgtactccgtgtccgacaaggatgaactggctggcgcactgggcaagcagtttggcatcacagatcccgaggtggtggatagactgtgcgccatcgatttcgtgacccctggcttcagcaatcggagcgccaagttcatgagaaagctgctgcccagactgatggacggcatcacatatgcagatgccgctggcgccatcggagtgaatcacagcggatctatcaccagcgccgacaatgcccaaagacctctggacgacagactgaaactgctcgagaagaacagcctgagacagcccctggtggaaaagatcctgaatcagatgatcaacgtggtcaacgccctggtcgagagatacggcgccattgatgaggccagagtggaactggccagacagctgaagcagagcagcgaagagagagtgcgggccacacagagcatcagcaagaacgagaaagagaacgccgacattgaggccaagatcagagagttcggcatcagacccagccggtccagaatccaaaagtataagatgtgggaagagtccggcaaagtgtgcatgtactgcggcatcgaagtgaaggacaaagagttcctggaatcccacgacgccgaggtggaacacatcatccccagaagcctgtacttcgacgacagcttcgccaacaagacctgcgcctgccacaagtgcaaccacgacaagggcaacagaaccgcctacgactacatgtctagcctcggcggagataagttcgccgcctatgagcagagagtggacaacctgtacgccgatggcaagatcagcagacggaagcacagctacctgctgatgaagcagtctgagatccccaccgacttcatcgagcgggatctgcggcagagccagtatattgccagaaaggccctggaaatcctgcggggcaccatcagaaatgtgtgggcttctagcggagccgtgaccggcttttttagacacgcctggggctacgacaacatcctgcacgacctgaacgtggacaagtatcagctggccggcctggttgagaacgaggaatatgagcaccggggccagaaacacgtgcgcgctagaatcaaaggctggaccaagagactggaccacagacaccatgccatcgacgccctgacaattgccctgaccacacagggctacgtgcagagactgaacaatctgagcagccagcacggcaacctgttcgacgatctgacccaagagaacgtggaactgcgggacaatagctccctgctgacaaagtgggccgccaccagacctcacttcacagtggaagatgtggccagcagagtgtccgagatcgccatctctctgaaaagaggcgtgcggctggctacaccagccaagcggtatattagaagaggcggcaagagggtgctgagccagactggaattgtggtgcctagaggcagcctgcacgaagagagcatctacggcagaatcagagtgtacgacggcgccaaggcctacaaggacgcctttcagaatccccacctggtggtcaacaacgaagtgcgggaagagatcgagagaagaatcgccgacgccggcaatgacgtggccaaagctctgaaggccctgaaaaagtcccctttcaccgtggtcatcaacggcgagcagcacaccctggacacaatcccttgctaccgcgaggaaatcgtgctgagatacaaggtggacggcctgaaagccaccgacgtgaagtacattgtggacaaggccgtcagagaagccgtggccgagagatatgatgagtgcggcggcaaccagaagctgttccagaactccgtgaacgctgaccccatctgcctgaagggaagccctatgcctatcaagagcgtgcggtgcatgacaggcctgaatgctggatctctggccggcgtgcgaaaggatggctctggaaagatcatcggcctggccaagacaggcgacaaccatcacgtggccttctaccgggacgagaatggcaaagaatgcagcatgatcacctccagatggggcgccatccgcagaaagctgaatggaatccctgccgtggttaccgatcctgccgctgcttgggttcgactcgagtatatcgccgatgaagctgtggccgccgagattgctgcttctcttcctatgcctggctggcagtttatccagagcatgcggcggaacgacatgttcgtgctcggaatgggagatgaggcctttgccgatgctgttgctgccggcgatcagtctacactggccaggcatctgtaccgggtgcagaccatctccaacagcgactacaggtttcggggccacaccgagacaaccgtggatgagagcaacgaggccaaagtgatgaagtctgtgctgagaatccagtcctctggcgcccttgctgccctgacacctagaaaagtgaaggtgtccctgaccggcgagatcatccctctgggatcc

SEQ ID NO: 235 - DNA, 3777 bp, Artificial Sequence
  OMNI nuclease sequence
ggtaccaaggtgctgggactcgatctgggccctacatctatcggatgggccatcatcgagatcgacgacaaggacaaccctgtgtccatcctcggaatgggcagcagaatcatcccttacggcgtggacaccgccagcgacgatttttctagaggcaagggcgagagcccctgcagcgagagaacaagataccggcagatgcggcggaacatcgacagattccagctgcacagacagcagctgaagtctctgctgctcggcctgggcatcatgaagaccgatacaattacccctgccgccaatcctctggacacctggaaactgagagccgatgccgccacacctggcatcaaactgtctctggaacagctggcctccgtgctgctgcacatcaaccacagaagaggctacaagcacgccaagagcgacatcggcgatagcaagcagaccgactacgtgtcccggatcaacgacagatacgccggcatcaagcagagcggcaagaccgtgggccagtacttctacgacagactgaaagagagcgaggccatcaacgataacggcaagaagtcctacacctaccggatcaagggcaaagtgtgccccagaaaggcctacgaggaagagacagacagaatcctggccgtgcagagcgagttctaccccgagatcctgaccgagggcaacagacaggccattaagcagaccatcttctaccagcggcctctgaagtcctgcaagaacctggtgtccttctgccagttcgagcggcacgagtttctgaacaaatacggcgagaaggtggaaaacggccccaaagtgacacccagatctagccctctggctcagatctgcagaatctacgaagccatcaacaacatccggctggtcaacgccagacggcagtgccagaaaaccgattgcaccagcagcatcttcaacggccctgccagcacaaccagagaagtgcggaagctgatgcccgagtaccggttcaatgaggaagagtacgagcggatcttcgacttcctgaacacccacgagaagatgaccgagaaggacctgttcaaactgctgggccttgccgccgacgatggctttaaatctgataaggccctcggcaagggcatccagggcaataccacaagatggcagatcgccaacgctctgggcgatcaccctgacaaagagaagctgctgagattcgagatcgtggaagaacaccccgccagcggacctgatattgccgcttctacaggcgagggcctgcctagaatctaccctcagtatatccaccagcctctgtacatgctgtggcacaccctgtacagcatcaaggacaaagaggaactgttcaaggtcctgagcgccaagttcggcatcaatgacacccctacactgaaccggctgtacgccctggattttgtgcaggccggctatgccaacaagtccgccaagtttatcagaaagctgctgcccctgctgaagcggggcatgatgtattctaaagcctgtgccatggccggcgtgaaccacagcaatagcatgaccagagccgagaacgaagagagagagctgcaccctaaactggcccagctgagaaagggcgaactgagacagcccgtggtggaaaagatcctgaaccagaccatcaacgtcgtgaacgccatcattgacgagttcggcgtgatcgacgaagtccggattgagctggccagagagctgaagaaagacaaagaaggccgggaaaagatggcccgggatatcgcccggaatgagagagagaatagagccctggccgatgagatcagcggcctggaaattcagcctagccggcggagaatccagaaaatgaagatgttgaaagaaaccggcaaccggtgcatgtactgcggcaagcctgtgacaccctaccagtttatcgaaggccacggctacgacatcgagcacatcatccccagatccagactgttcgacgacagcttcgccaacaaagtctgcgcctgcagagagtgtaacgccgccaaaggcgcccacaccgccttcgatttcatgaagtccagaagcgagcaggacctgaactcctacctggacagagtggacgagctgtaccgggccaacaagatcagcaggaccaagcgggatagactgctgatgagcgcctctgacatccccgacgacttcatccagagggacctgagagagacacagtacatcacccggaagtccatggaaatcctgtccgccgccatcagaaatgtgcacgccagctctggcatggtcaccgatttctttagacacgcctggggctacgataccatcctgcacgacatcaatctgcccagatacgaagccgccggactgacagagaacgtggaataccagagccacggccagaaacacatggcccacagaatcagaggatggtccaagcggaaggaccacagacaccatgctctggatgcactggtggtggctctgaccagacagggctacatccagcggctgaataccctgaacgccctgagcgataagagcgacgatggggagaagtggtccagcctggatagatgggccgctgaaagacctcacatcggccggcagaaagtgatcgaggctctggaaaaggtggccgtgtcctacaagcctggcaagaagctgaccacaccaggcaagagatacgtgcggaaggatggcagacggacctgtgtgcagacaggcgtgacaatccctcgggctcctctgcacaaagaaacagtgtacggcaggatcaagatcgatgacggcgaaaaggatctgaagcacgccctgcagaacatcaacctgatcaaggacgacggcatccgccagcagctggctatgagactgcaagagaacgacggcaacatccctctgaccatcaaggccctgaaaaagaacaacctggaagtcggcggacgcagcgtggaaaatgtgcggtgctacagagaggaaatcgtcgtcagataccctctggaatccatccggtacaaggacctgcggtacatcgtggaccctcacatcagagaaatcgtgcagacccggttcaccgaagtgggcaacgccgacaaagacttcgtgaagtccctgacagagcggcccctgtactccgacaagaactgcagacaccagatcagagccatcagactgatcagcggactgaacccttctacactggcaggcgtgcggagagatcagagtggcgatacaatcggctacgcccagaccagaaacaaccaccacctggcactgtacagaaaccccgacggctctatcgtggaaagcgtggtgtctttctgggactgcatcaagagaaagcaggccggactgcctcctatcatcaagaatcctgccgaggcctgggacaccgtgatcgccaattctgagtctgccagattcgccggaatcgccgacacactgcctccagatggcagcgagtttatcatgagcctgcagcggaacgagatggtggtgctgggcatgtccgacgacgaatggaatgatgccgtggccagcaacgacttcagaaccatcaacagacacctctaccgcgtgtggaagctgagcagcggcaagtactgcttcaagttccacaccaacacctctgccgccatcgaggatggcgacagagagatccggcagttctacgtgacaagcctgagcagcctgagagccctgcatccacggaagatcacaatcagcatcctgggcaaccccgatagcctgagcgacgacaaagaaagccccatgctgggatcc

SEQ ID NO: 236 - DNA, 4131 bp, Artificial Sequence
  OMNI nuclease sequence
ggtaccaagcagaagatcctgggcctcgacctgggcaccaatagcatcggaatcagcgtgcggaatacccagaagtccggcaagatcaccgaccagctggaatacttcagcagcttcatcttcccctctggcgtcggcattggcaagagcggcgaattttcttacgccgctcagagaaccgaggccagaagcacaagacggctgtaccagagcagacggtacagaatctgggccacactggaagtgctgaccgatctgggcttctgccctctgagcaaagaggatctgcacgcctggtgcacctacagcaagaaagagaacctgttcagagagtaccccgccgacgctaaagaatttgagcagtgggtccgactggacttcgacaatgatggcgtgcccgagtacacaagcccttaccagctgagagccgagctgatggaaagacagttcgacttcggcaaccctctggaacggtacaagttcggcagagccctgtaccacattgcccagagaagaggcttcaagagcagcaagggcgagacactggaaagccaagaggataccgccaacggcgtggaagtggatgtggcctctgagctgaagaagtccgaggaaaagaaggccaagggcctgaaagagtacatgggccagaacaactgccctaccgtgggctgcgccttctacagaatggaacaagagggcctgagagtgcgggccaatgaacagatgcaggccgtgcggtctatgtacgaggaagagatcgacagcatcttcacctaccagaacggcctgagcaaggacagcgagctgtacagacggatcatgagccacaagaaaggcgagggctgcatcttctacaagcggccccttagaagccagaaaggcaccgtgggaaagtgcaccctggaaaagaacaagagcagatgccccatcagcagacccgagttcgagcagtttagagcctggtccatcatcaacaacctgcggtacaagaccaaggacgacagcggcaagcctagcagagagctggaactgagcatccggcagcagctgtacgaagagaagttcgtgcgggcctccaacttcaagatggaagatatcctgaagtggctgaagaaaaagaacagcgacgtggccgaactgaactacgaggacaagacaagcgtgatgggcagccctgtgtgcgccaagctgaaggacattctgggagatgactggcagcaccagaccatcgagggctacgattacgtggaactgtggcacgtgtgcttccaagccgatgaggccgagaacgtgaaggacttcagcatcacccatctgcatgccgacgaggtgctgtgtgccaagatgattaagctgtggggcgccatcagacccgattacgcctctctgtctctgaaggccatctgcaacatcctgcggatgctgcaagagggctacatctactctgatgccgtggtgctggccaagctgcctgacgtgttcggcgacaactgggagaaagtgaaagagcccatcctgaacgagtggatcagcatccagagcaccatcgagcacagcagactggtggccaagatcacaaacaacctgatcgccgagtacaaggtgctgcccgccgaggatcagttcgccttcagaaacaccgactacctgctggacgagagcgacaagaagcagatccagaaggccattatcagcaatctgagccccaagcggtggaagcagctgaccaagcaagaacagatcgacctgcaagagaacgtggccaacgcctaccagcagttcttcaagtcccaagagcggaactacctgcctatccagcacctgacagatgccctgagcagcctgatcatcgacaacttcggcgacttcgtggccgacaactacaagagcaagctggaacagggccgcgacatcttctatcaccccagcatcgtgtccatctacgcccctcaagagcctagagaggtggtcaccaaccggggcatcagacaaatgaagttgctgggctcccctgccaccaacgtgttcagaaaccctgtggtcatgcgggtgctgtatcagctgagaaccacactgaaccagctgattgccgacggcatcatcgacgagtctgataccagcgtggtggtggaaaccgccagagagttcaacgacgccaacatgagagccgctatcgcccagtaccagcgcgaccgggaaaaagagaacgagaagtacaagagcgaactggccagctactaccccgacagaaacatcagctccaccgacatcgacaaagtgcggatctggcacgagcagggcgagagatgtatctacaccggcgacatcatcagcctgtccaacctgctgaacgacgacagcttcgagattgagcacaccctgcctcggagcatcagcttcgatgatagcctggccaacaagaccatctgcagcgcccactacaaccgctacgtgaagaagaatctgttccctagcgagctgcccgaggtggactatcaggccatcctgacaagaatcgagccctggcaagagaagatccggtccatcaaggcccagatcaccctgcggaagaacaagtccaagtccgccaccacacctgacatgaagaacaaagccatcaaagagcggcacatcctggaaatggaactgcggtactggcaggacaaggtgtcccggttcaccatcaagaaggacgactggaaccccggcttccggtctaatcagctgaacgatacccggaccatcacgaagtacgcctatcacttcctgcggagcgtgttcggagaagtgacagtgcagaggggcgaaatgaccgccaactttagaaaggccctgggcatccagtccatggatgagagaaaggacagaggcaagcacagccaccatgccgtggatgccacaatgctgacactgatccccggcaacaccaagagagatcagctgctggacctgttctaccagagagaggaactgcagcggagaatggaaagcgacgcctctgtgaaggacgccctggatgaggtgtccaagcagtacacccagatcctgaaaagctgcgacatctgcggcgtggacgaagtgaccgagtacatccagaaccacatcctgatccaccactgcaccaaggaccagacactgacccctagcaagcggaggatgagaaccagaggcaaagtggtggtcaaggacggctccgagagatgggtcatgggcaattctatcagagcccagctgcacaagggcagctactttggagccatccagtctggcgagacaaacgccaatggcgagaaagaaatcctgatggtggccagagtgcccatcgacgccttcaagtctaaggacgatatcgagaagatcgtggacagcagagtgcggacctctgtgctgcacgtggtcaacaagagaatgagcgagggcatgagcttcgctgacgctctgaagcagcccatctggatgcaggacaacaacggccaagagatcaaaatggataagtacggccgcagactgcagcctatcagacacgtgcggtgtaaagtggccgctggcatgggctttctgaccaaggataaggccctgccaatccgcgaacaggtgtacacatccaagaacacctacaagaactacgtgtacgcccagaacgacggcaactacctgtgtctgctctaccagggcgagtataagggcaagctcgtgcgcaagatgcagttcgtgaactacttcacaatcgcccagctcggcatccggaatatccaagagctgatgcagctgcccagctaccagacaattgaggacggcaagaaaacatacaccctgaccgccatcatgaagaccggcacacacgtgctgatgtggaaggactaccctgaggaactgagagacatggaccctgaacagctgtataagcggctgtactgggtctacaagttcaacaacagcggcagcgactacgtgttcgtgcagaaccacctggaagcccggtccaacgatcagatccccaaggatgagacaacattcatccccgagcagtaccaggccagactgaagctgaacgccaacgcttgcaacttcctgatcgagggcgtgaacttccggatcaccgagacaggcatcgagtttctgggatcc

SEQ ID NO: 237 - DNA, 3636 bp, Artificial Sequence
  OMNI nuclease sequence
ggtaccaagagaatcctgggcctcgacaccggcacaaattctcttggatgggccgtcgtggacagattcgacgacggcaagtacaatctcgtgcggagaggcaccctgatcttccaagagggcgtgaagatcgagaagggcatcgagtctagcaaggccgccgagagaaccgagtacagaagcagcagacggcactacttccggcggagactgagaaagatcgaaaccctgaaggtgctgatcaagtaccggctgtgccctgctctgaccgaagaggaactgaagctgtggcacctgaagaaaaagtaccctatgaacgaggccttcctgcagtggcagaggaccaacgacaacaccgacgtgaacccctaccactgccggcacatctttctgcacgagaagctgaacctggaaaaagagagcgaccggttcatcctgggcagagccttttatcatctggcccagagaagaggcttcctgagcaacagactggaccagaccaaagaaaacgacgatggcatggtcaagaccagcatcagccagctgggcaaagatatgcaagaggccggctgcgagtacctgggcgactacttctacaagctgtaccaagagaagtccaacaccatccgcatccggaagaactacaccagccggaaggaccactacatcaaagagttcaacgccatctgcgactgccagaacctgcctgacgatatgagaaaggccctgtacgacgccctgtacttccagaggccactgaagtcccagagatacagcgtgggcaagtgcaccttcgagaagaacaagcccagatgcgccgtgtctcaccctctgtacgaagagttccggaagctgagcttcatcaacaacatcagagtgcgcgtggacttcttcggcaagggcgaagaaagacccctgaacgaggaagagatcaagaagatcgacaagctgttctaccggaagtccaagaacttcgacttcgaggatatcgccaaggctatcgccggcaaggacaattaccagtggctgaaggccgagggcgacaagcagtacaagttcaactaccggatggaccagggcgtgtccggctgtcctacacagacagagctgaaggacctgttcggcgacgactggatgaacggaatcgccgagcggtacacctgtaacaagcaccaggatggcacccctaagacacaagaggaaatggccaccgacatctggaacgtgctgttctccttcgacgatgacggcaaagtgaaagagttcggccggaagaaactgcagatgtctgaggaagaggccgagaagttcgccaacatcaagctgcagcagggctacgcctctctgtctctgaaggccatccacaagatcctgccatttctgaggcagggcgacatctacacctacgccgtgtttctggccaaggtgccagatatcgttggccacggcatctgggagagagacaaggacgagatcattgccgacctgaagtacaacatcgacctggccatcaaagaacaccggcggatcgatgaagccgtgcggggctatctggaaaacaactttgagctgaggcccggcatcctggacgacctgtatcaccccagcatcaacgacgtgtacgaggacgccaagcctaacaaggatggcatcctgcagctgggctccccaaaaacaaatgccgtgcggaaccctatggccatgagatctctgcaccaagtgcggaaggtggtcaaccagctgctgctggaaggcgtgatcgacagaaacaccgaggtgcacatcgagtacgccagagatctgaacgacgccaacatgagacaggccatcagcagctaccagggcgaccagaagaatgagcacaacaaagccgccaaagagatccgcaagctctacaacgaagagacaggcatggacatcgagcccaccgacgacgacatcctgaagttccagctgtggaacgagcaagagcacaagtgtatctacaccggcgccaccatcgggatcgccgattttgtgggcgccgacagcaagttcgacattgagcacacaatccctcagagcgtcggcggcgacagcaccagaatgaatctgaccctgtgtgacgccaagttcaatcgggaagtgaagaaggctcagctgccaagccagctgagcgactacgacaacatcatggaacacatcaagccctggaaggacaagatcgaggacctgaccaggcagattaagaagattcggacctacagcggcatggataagcgcgagaaggacagcaagatccagaagcggaaccggctgaagattgagctggactactggaaggggaagtacgagcggttcaccatgaaggatgtgcccgagggctttgccagaaggcaaggcgctggaatcggcctgatctctaagtacgccggcctgtacctgcggagcctgttccacgatccagccaatcctgacaagcggcagatctacatcgtgaagggccctatgaccgccgagtttcggaagatgtggggcgtgcaagaggaatacgagaagaagtctcgggacaatcacgcccaccactgcatcgacgccatcgtgattgcctgtatcggcaaggccgagtacgaccggctggccttctactatacacaggtggaaaaaggcgtgaagcccgagttcgagaagccttggaacaccttcacacaggacgtgaagaagattgccgacgagctgctggtggtgcacgacacccctgacaatatgcccaagcacacccggaagagagtgcggatcagcggcagaggaatcaagatggctcagggcgatagcgccagaggcaagctgcacgaggaaacctattacggcgccatcaagaaggacgacgagattaactacgtgtcccggcggtccctggaaaagctgaaagaaaccgacgtggacaatatcgtggacgatgtcgtgcggcagaagatcaaggacgccgtcagcagcaagggcttcaaagaggccatcaagggccccatcttcatgaatgaggaaaagggcatcctgatcaagaaagtgcggtgctacgccaagatggttaagaaccctctgatcatccggcagcagagggacgtgtccgccaaggattacaagcagcagttctacgtgaccaccgacaccaactactgcatggccatctacgagggcatgctgaacggcaagctgaagcggagctacgagatcgtggatatgatcgaggccagcaagtactacaaagagagcaacgacaccaagaacgtgtaccccatcgtgcccgagaaccggaaagaactgaagtataagtgtatggtcaaaacgggcacccaagtgattctgctgcagaacagcgaagagaagctggatctggacgatgagaagtccctgagcaagaggctgtatcacgtggccggcatgttcaaggatggacggctggtgctgcggagcaacaaagaagccagagaggccggaaagctgtccaaagaaacacaggccggggtgtacaaagagtccgacgactaccgcagccagatcagaatcagcctgtccgacttccacgctctgatcgagggctacgacttcaagttcacccctctgggcgatatcaagctgatcaaccacgccggatcc

SEQ ID NO: 238 - DNA, 3621 bp, Artificial Sequence
  OMNI nuclease sequence
ggtaccgaaagaatcctgggcatcgacaccggcaccaattctctcggatgggccatcgtggacaaggacgacaatgagtaccacctggtggccaagggcaccaacatctttagcgagggcgtgaagatcgagaagggcatcgagtctagcaaggccagcgagagaacaggctacagaagcgtgcggaagcactactggcggcggaagatcagaaagatccggctgctgaccatcctgagcgagaacaatctgtgccctccactgaagaaagaacagctgagactgtggcggctgaaaaaggtgtaccccgtggacgacgatttcatgggctggcagagaaccgaggacaaggccaacgtgaacccctacaagttccggtacatctgcctgaccgagaagctggacctgaccaatgtgacccagcggtacattctgggcagagccctgtatcacctgaaccagagaagaggcttcctgagcaaccggaaggacagcaccaaagaatccgagggcgccgtgaaagagggcatcagcagcctgtctgacgatatgaaggcctccggctgtgaatacctgggcgagtacttctaccagctgtaccagaagggcgagaagattcggaaccactacaccgccagaaaagagcactacctgaaagagttccacgccatctgcgagaagcaagagctggacgccttcttcgtggaaaagctggaaaaggccatcttcgaccagcggcctctgaagtcccagaaaggccaagtgggcacctgtaccttcgagaaaggcaagcctagatgccccagctctcaccctctgtacgaggacttccggatgtactccttcctgaacaacatcaaggtgcaagtgaacaccctgtacgagaaaggggagagatacctgaccgccgaggaaaagagacagatcatccctctgttcaagcggaagtccaagcggacctttccattcgaggatatcgccaagaagctggccggcaagaacaactactgctactacaaggatgaggaagagaagccctaccggttcaactaccagatggacacccaggtgtccggctctccagtgaatgctcagctggaagaactgttcggcgaggattggctgagcggagtgtgcgaagtgtacacactggccaaggacaagacccggttccagatcatgaacgacgtgtggcacgccctgttcttctacgacgacgaggataagctgagagagttcgcccagaacagactgcagctggatgaagcccaggccgtgaagttcagcaagatcagcgtgcccaacgactacgccgctctgtctctgaaggccattcggaagatcctgccttacatgcggcactacggcctgatctacagcgaagccgtgttcctggccaacctggtggatgtgctgcctggatatgtgtggggcgtgaaagaaatgagagaggccgccatcgagaacgtgatcgacgtgatgcacagctacgacaagaagaacatcgacggcatcaccctggaagcctgcgtgaagggctttctgaaagaaagataccaggtggacgatgacaccctgaagaagctgtatcatccttccatgctggatctgtaccccagacagagagccaaccaggacggcatctatcagctgggcagccctagaatcagcagcgtgaagaaccctatggccatgcacagcctgttcagactgcggaaggtggtcaacctgatgctgaagaagggctacatcacccctgagacaaagatccacatcgagttcagccgggacctgaacgacgccaacatgagatgggctatccagacctggcagcgcgagaacgagaaggatagagagcggtgccgcaaagaaatcgagaaatacgtggccacacctaccgagaaggacatcctgaagtatcagctgtgggaagaacagaaccacaagtgcctgtacaccggcgaggaaatcagcctgacagacttcctgggcaaagaccccagatacgacatcgagcacacaatccctagaagcgctggcggcgactccaccaagatgaatctgaccctgtgcagcaacagctacaaccgggacatcaaaaagaccaagctgccctctcagctggccgctcacgaagagatcctggaacggatcaaggcctggaaagagaagtacgaggaactggaccacatctttcggaagctgaagggctccagcgcctccaccaaagaggaaaaggaccggattatccggaagaagaacctgctgaagctgcagcgggattactggcggggcaaatacgagagattcaccatgacagaggtgcccgagggctttagcagaaggcagggaaccgacatcagcgtgatcagcagatacgccaggatgtacctgaagtccgtgttcaaacaggtgtacatcgtgaagggaatcgccaccagcgatttccggaagctgtggggcatccaagaggactacgcccggaaagaacgcgtgaaccacgtgcaccactgcatcgacgccattacaatcgcctgtatcggcaaggccgagtacgacaagctggcccagtactaccacgagacagacgagtacaagctcggcaagggcaagaagcccgacttcgagaagccttggcctagcttcgtgctggacatcagacacatccaggacgaactgctgatcgcccactacagcaaggacaacctgcctaagcaggccaagagatacgtgcgggatagcaaaggcggcaagatcctgacacagggcgatacagccagagccagcctgcacaacgagacttactacggcgccatcgaagtggacggcgacgtgaaatacgtcgtgcgcaagagcctggattccctggacgaaaaggacatcaagaatatcgtggacgccgaagtgcggagcaaggtggaaaaagctgtgcagagcagcggcagcctgaaaaaagccgtggaaaaaaccatctggatgaatgaggaaaagcagatccccatcaacaaagtgcgggtgttcgccggcagcgtgaccagacctattcacatcaggcagcagagggaccagagcaagcacgagtataagcggcagtatcacgtgcagaacgaccggaactacatgatggctatctacgtcggccaggataagaagggcaaagagaagcgcgagttcgagctggtcaacaatatcaccgccgtgaacttctaccggcggagcaacgataaggtgccaaccgataatcagctggtgccccagttctccaagagcggctacgagctgcggtacaagctgaagatcggcacaatggtgctgctgtatgagaacagccctgaggaaatctgggacctcgaccgggccaatctgcagaaacggctgtacaaagtgaccggcctgagcagcatggtcatccagggcaaatatgagttcggcaccatcgagatgatccaccaccagaacgccaagcctagcaccgagatcaagaaagtgaacggcgagttcaagcacgacgaagagttcagacccggcatcaagatgctgcactcccagattaaggccctggtgcagggcgtcgactttgagatcaatgatctgggcgagattcggcggctgatcggatcc

SEQ ID NO: 239 - DNA, 4476 bp, Artificial Sequence
  OMNI nuclease sequence
ggtaccgccaccagaaagatcctgggcctcgacctgggcacaaattctatcggatgggccgtcgtgtcccagaacatggactctagatctatcgccgctgccggctccagaatcatccctatggatgccgctctgatgggcgacttcgagagcggcaattctgtgtctcagaccgccaatagaaccgccgccagaggcacaagaaggctgtacgaaagacgggccctgcggagagaaagactgtgcagagtgctgagcatcctgggctttctgcctccacactacacccaagagctgaacagatacggcaagctgaacaagggcgccgagcctaaactggcttggaccgtggaagggatcaagcccacattcctgtttcagcccagcttcgaggaaatgatgcgggactttgctgtggcccaacctcagctggccgccaatggaaagaagatcccctacgactggaccatctactacctgcggaagaaggccctgacacagcccgtgacaaaacaagagctggcctggattctgctgcagttcaaccagaagcggggctacaatcaggccagaggcgaggaagaggaaactaagaccaacgagaagaaagagctgatcaccgccaaggtggtggaagtccgcgatacaggcgaagtgtccaagggcagaacttggtacgaggtggtgctggaaaccggcgacatctacaagagacagagcgcctatcctctggactgggtcggaaagaccaaggacttcatcgtgaccaccaagctgaatgaggacggcagcgaggccatcgacaaagagggcagacctaagagaagcttcagcgcccctcaagaggacgactggggcctgagaaagatcaagaccgagcacgatatcgcccagtctggcaagaccgtgggcgagtttatctacgacgccctgctgcacaaccccgatcagaaaattgtgggccagctcgtcagagtggtggaccggaagctgtacaaagaggaactgcggagaatcctggacacccagaagcagttcatccccgagctgcaggaccctgacctgtacagacagtgcatcgaggctatctaccctcagaacgaggcctaccggaactctatcgccaacaaggatttcacctacctgctgctgcaggatgtgctgttctaccagcggcctctgaagtccaagaagtccctgatcaacgagtgcccctacgagtaccacgtgtaccagaccaagaacggcgactggaagcggcagtacctgaagtgtatcagcaagtctcaccctctgtacgaagagttcagactgtggcagttcgccgagaacctgcacatctataagatcgacgccaacggcatcggcaagagcgattgcacagccgactacatccaggacaaggccgctctggttaagtggctgctgacccagaaagagatcaccgagaagtccatcctgagcaagttcgccggcaagaaggccaaggacctgagctggaactacgtgtccgacaagaagtaccccagcgctcctgtgacagccacactgacagccatcattgccgaagtcggcggcaccatcaacaacgaagaactgcaccacatctggcacattctgtactccgtgtctgacaaagagcagctgacacaggccctggctcactacgccgagaagcacaatctgagcagcgtgttcgtggaaaagctgagcaagcagaagcccttcgccgccgattatggcgcctattctgaaaaggctgtgcggcggctgctgagcctgatgagatgtggcgagtactggaacgaggaaaacatcgaccctcagaccaagcagcggatcgaacacattctgaccggcgaagtgaacgacgccatcagcgacagagtgcgcgagaagctgaaggatctgaacaacatcagcgatttccagggactgcctctgtggctggccgagtacgttgtgtacgacgtgcgcaagaacgacaccaagtgggagacacccgaggacatcgataagtacctgcagagcttccggctgcacagcctgaacaaccctatcgtggaacaggtcgtgatggaaaccctgagaaccgtgcgggacatctggaagcaagagggccacatcgacgagatccacatcgagatgggcagagaactgaaacagaacgccgagcagagaaagaacaccctgaccagacagcaggacaacgagaaagccaacctgagagccaagctgctgctccaagagttcatgaatcccgacgccggcatggatggcgtgcgggcttattctcctagccagctcgaactgttccggatctacgaggacggcgtgctgaacaatagcaacgccaccagagatgacgacatccagcggatcatcaaggatctgtccgagctgaagcagccctctgctgccgatgtgcggaagtacagactctggctggaccagaagtacatcagcccttataccggccagcctattccactggccaagctgtttacctccgcctaccagatcgagcacgtgatccctcagagccggttcttcgacgacagcatgagcaacaaagtgatctgcgaggccgaagtgaatgcccggaaggacagaatgctggcccatgagttcatcaccaagtgtggcggcgagaagatcacactgtctggcggcagagtggtcaccgtgctgacaacacaggcctatgaggatctcgtgcgggatacctacaagaccaatcctcgcaagcaagagaaactgatgctggacgatatccccgagaagtttatcgcccggcagatgaacgacagccggtacatctctagactgatgctcggcctgctgagcaacattgtgcgggaaaagaacgccaagggcgagtacgagcctgagagcacctctaagaacgtgatcgcctgcaacggctccaccaccaccagactgaagaaggactggggcatcaacgacgtgtggaaccggatcatcctgcctagattcgagcggctgaaccagctgcagaacaccaccatctttaccaccaagacagccaacggccacacaatccccaacatgcccctggaactgagcaagaacttcgagaagaagagaatcgaccaccggcaccacgccatggatgccatcgtgattgccttcaccacacggaaccacgtgaacctgctgtccaatgaggctgccctggaaaaggacgagaacgccagatacgacctgcagatgcagctgagaaagcgggaaacctggacaagccccaatggcaagtcccacaccaagttcaccgacttcattgccccttacgagggcttccagcaggacgtgcagaccacactggaaaacattatcgtgtccttcaagcagaacctgcggatcattaacaagagcaacaaccacaccgtgcacttcgaggatggcaagaaaaagagcgtgaagcagacaaagggcgacaactgggccatccgcaagtctctgcacaaggccaccgtgttcggcaaagtgaacctgagattcagaaagacgaccccactgaagtacgccctgactcacctgaacgacatcgtggataaggacctgcggctgaagctgagagaactggtggcccagggctacgacgagaagaggctgaagaagtattttgccgagaacaaggacgtttggagcgacatcaacctgcagaagatcgagatctactactacaccaacgacacgcccgacaactactacgccacaagaacagccctcggcgattggctggatgagaagtctatccgcgagaaagtgaccgacaccggcattcagaagatcctgctggctcacctgtctcagtgcaacggcgatcctaaagaggccttttctgccgacggcatcgagaagatgaaccagaacattgcccagctgaacggcggcgtgccacacaagcctatctacaaagtgcggaaatacgagaaggccgacaagttcgctgtgggcgagatcggctccaagtccaaaaagtttgtggaagccgacaagggcaccaacctgttctttgccatctacgccaccaccaacaccgacggcaaagaagtgcggagctacgctacaatccctctgaaggccgtgatcgactgccagaaacggggcaagaaagagtggaagcccctgctggatcagtgggtgcacaacaacaacctggtgcctgccaacgccactctgaagtacattctgagccctggcgacctggtgtacctgccacaagatggcaccgccacaatcgacaagaccaggatctacaaaatggtgtccagcaccggcaaccagtgcttttgcgtgccctgtagcatggcctctccaatcatcaacaaggtcgagttcagcccactgaacaagatggaaagagccatcaccggggagatgatcaaagaaacctgcgtgccaatcagagtggaccggctgggcaacatcatcagcatcaagcccggatcc

SEQ ID NO: 240 - DNA, 4476 bp, Artificial Sequence
  OMNI nuclease sequence
ggtaccgccaccagaaagatcctgggcctcgacctgggcacaaattctatcggctgggccgtcgtgaaccagaacatggatagccagtctatcgccagcgccggcagcagaatcattcctatggatgccgctctgatgggcgacttcgagagcggcaattctgtgtcccagaccgccaatagaaccgccgccagaagcaccagaaggctgtttgaaagacgggccctgcggcgcgagagactgaatagagttctgagcatcctgggactgctgcctccacactacgcccaagagctgaacagatacggccagctgaacaaaggcgtggaacccaagctggcctggatcgtggaagggaccaagcctacattcctgtttcagtccagcttcgaggaaatgatgcacgacttcgccgtggctcagcctcagtgggttgccaatggcaagaagatcccctacgactggaccatctaccacctgagaaagaaggccctgacaagccccatcaccaagcaagagctggcttggattctgctccagttcaaccagaagcggggctatcatcaggccagaggcgaggaagaggaagccaagcctaacgagaagaaagagctggtcaccgccaaggtgctggaagtccgagatacaggcgaggtgtccaagggcagaacttggtacgagatcgtgctggaaaccggcgacatctacagacggcagagcgcctatcctctggactgggtcggaaagaccaaggacttcatcgtgaccaccaagctgaacgaggacggcctggaagccatcgacaaagagggcagacctaagagaagcttcagcgcccctcaagaggacgactggggcctgagaaaaatcaagaccgagcacgatatcgcccagtccggcaagacagtgggcgagttcatctacgacagcctgctgcagaaccccgatcagaagatcatcggccagctcgtcagagtggtggaccggcagctgtacaaagaggaactgagaagaatcctggacgcccagaagcagttcatccctgagctgcaggaccctgacctgtacagacagtgcatcgaggccctgtatcctcagaacgaggcctaccggaacagcattgccaacaaggatttcacctacctgctgctgcaggatatcatcttcttccagcggcctctgaagtccaagaagtccctgatcaacgagtgcccctacgagtaccacgtgtacaaggccaagaacggcgactggaagcggcagtacctgaagtgtatcagcaagtctcaccctctgtacgaagagttccggctgtggcagttcgtggaaaacatgcacatctacaagaccgacgccaacggcatcggcaagagcgattgcacagccgactacatccctgataaggccgctctggtcaagtggctgctgacccagaaagaagtgaccgagaagtctctgctgagcaagttcgccggcaagaaggccaaggacctgagctggaactacgtgtccgacaagaagtacccagccgctcctgtgacagccacactgacagccattattgccgaagccggcggaaccaccaacaacgaagaactgcaccacatctggcacatcctgtactccgtgtctgacaaagagcagctgacacaggccctgatgcattacgccgagaagcacaatctgagccccgtgtttgtggaaaagctgtccaagcagaagcccttcgccgccgattatggcgcctattctgaaaaggctgtgcggcggctgctgagcctgatgagatgtggcgagtactgggaagagacagacatcgaccctcagaccaagcagcggatcgatcacatcctgaccggcgaagtgaacgagacaatcagcgacaccgtgcgcgagaagctgaaggacatgaacggcatggtggatttccagggcctgcctctgtggctggccgagtatgtggtgtacgacgtgcggaagaacgacaccaagtgggagacacccgaggacatcgacagatacctgcagagcttcagactgcacagcctgaacaaccccatcgtggaacaggtggtcatggaaaccctgagaaccgtgcgggacatctggaagcaagagggccacatcgacgagatccacatcgagatgggccgcgagctgaagcagaatgccgagcagagaaagcagaccctgagcagacagagcgacaacgagaaagccaacctgagagccagactgctcctgcaagagttcatgaatcccgacatgaacatcgagggcatcagagcctgctctcccagccagctggaaatcttcagaatctacgaggatggcgtgctcaacaaccccgacatcgataaggacgacgacatccagagaatcatcaaagagctgtccgagctgaaacagcccagcgccagcgacgtgaaaaagtacagactgtggctcgagcagaagtacatcagcccttataccggacagcccattcctctggccaagctgtttacccctgcctaccagatcgagcacgtgatccctcagagccggttcttcgacgacagcatgagcaacaaagtgatctgcgaggccgaagtgaatgcccggaaggatagaatgctggcccacgagtttatcaccaagtgtggcggcgagaagatcaccctgtctggcggaaaagtggtcaccgtgctgacaacacaggcctatgaggatctcgtgcgcgacacctacaagagcaaccccagaaagcaagagaaactgatgctggacgatatccccgagaagtttatcgcccggcagatgaacgacagccggtacatctctagactgatgctcggcctgctgtccaacatcgtgcgggaaaagaatgccaagggcgagtacgagcctgagagcacctctaagaacgtgatcgcctgcaacggcagcaccaccaccagactgaagaaggactggggcatcaacgacgtgtggaaccacatcatcctgcctagattcgagcggctgaaccagatccagaacaccaccatcttcaccaccacaaccgccaatggccacacaatccccaacatgcccctggaactgtccaagaacttcgagaagaagagaatcgaccaccggcaccacgccatggatgccatcgtgattgccttcaccacacggaaccacgtgaacctgctgtctaacgaggccgcactggaaaaggacgagaaggccagatacgacctgcagatgcagctgcggaagcgggaaacctggacaagccctaatggcaagtcccacaccaagttcaccgacttcattgccccttacgagggcttccagcaggacgtgcagaccacactcgagaacatcatcgtgtccttcaagcagaacctgcggatcatcaacaagtccaacaaccacaccgtgcacttcgaggacggaaagaaaaagagcgtgaaacagaagaagggcgacaactgggccatccgcaaaagcctgcacaaggccaccgtgttcggcaaagtgaacctgagattcagaaagacggccccactgaagtacgccctgacacacctgaacgacatcgtggacaaggatctgcggctgaagctgagagaactggtggcccagggctacgacgagaaacacatcaagaagtatttcgccgagaacaaggacgtgtgggccgacatcaacccacagaaaatcgaggtgtactactacaccaacgacacgcccgacaactactacgccactagaacagccatcggcgattggctggatgagaagtccatctgggagaaagtgacagacaccggcatccagaaaattctgctggcacacctgagccagtgcaacggcgatcctaaagaggccttttctgccgacggcatcgagaagatgaatcagaacatcgtggccctgaacggcggcgtgccacacaagcctatctacaaagtgcggaagtatgagaaggccgacaagtttgccgtgggcgagatcggcagcaagagcaagaagttcgtcgaaaccgacaagggcaccaacctgttcttcgccatctacgccaccaccaacgccgacggaaaagaagtgcggagctacgccacaattcctctgaaggccgtgatcgactgccagaaacggggcaagaaagagtggaaatccctgctggaccagtgggtgcacgacaacaatctggtgcctgccaacgccactctgaagtacattatcagccctggcgacctggtgtacctgcctaaagaaggcgccgctacaatcgacaagacccggatctataagatggtgtccagcaccggcaaccagtgcttttgcgtgccctgtagcatggcctctccaatcattaacaagatcgagttcagcccgctgaacaagatggaaagagccctgacaggcgagatgatcaaagaaacctgcgtgccaatcagagtggacagactgggcaacatcatcagcctggaacctggatcc

SEQ ID NO: 241 - DNA, 4083 bp, Artificial Sequence
  OMNI nuclease sequence
ggtaccgaggaaagcaagtactacctgggcctcgatatgggcacatcttctgttggctgggccgtgacagatgcccagtactgcatcctgcggaagaaaggcaaggacatgtggggcatcagagagttcgaacaggccgaatctgccgccgagagaagaagccaccggatcaatagacggcggagacagagacaggtggccagaatcggcctgctgaaggactacttcgccgacgagatcgagaaggtggacaagaacttctacgtgcggatggaaaactccaagtacttcatggaagataaggacgagcggctgcagagccacaacggcatcttcgacgacgacaccttcaaggacgaggactactacaagctgtaccccaccatcttccacctgagagccgctctgctggacatggataataccggccaggcctttgacgtgcggctggtttatctggccctgctgaatatgttcaagcaccggggccactttctgctgaacacagagtctagcgagagcggcgacgtgcagatcagagtgcagtacgaggacctgatccggcaagtgaacgagaagtatggcgtggaactggccgccgtgcctgccaagtctgtgatcgccatcatcggcgacaaagagatcggccggaagctgaagcacgagaagctgctggaactgttccggatcaaccggaagaacagacgggtgtccgagttcctgaagtgcatgagcggactgagcagcgacgccaataccattctgcagcccggcgtggaagagaagatccccgtgtgcttccacgacttcagctacaccgatcagatccccgagctgatggaacagctgggcgacgagaaatacgccatcattgagcagatgaaggccatctacgactacgccatcctgaccggcacaatgcagggctacgaatacctgagcctggccagagtggccgactatgagaaacacagagccgatctgaagtgcctgaaagagatctatcggaagtacaagagcaaagaggtgtacgaccggatgttcagaagcgaccagcctggcacatacagcgcctacgtgaacagcctgaagtccgccgatcacaagtaccggcggaacatgaaggaacggaaggccgagaacctgtacgtgaccatcaagaaagagctgaaggattgcgccgagggcgacgaacaggtgcagtacatcctggaccagattgagaaagagcagttcctgcctaagcagctgacaggcgctaacggcgtgatccccaaccaggtgcacagaaaagagatggcccgcatcctgaagaacgccgagcggtatctgcccttcctgaaagaacaggacgagtccggctacaccgtgtccgagcggattctcaagatcttcagctttcaaatcccctactacgtgggccctctcggcgtgggatctaaaacaggatgggtgcagagaaaggccagcggcagaatcctgccttggaacctggaagaaaagattgacaagcaggccaccgccgaagagttcatcaagcggctgatcagaagctgcacatacctggccggcgagaaagtgatgcctaaggcctctctggcctatgagaagtactgcgtgctgaacgagatcaacaacctgcggatcgacggcgagagaatcgacaccgagctgaaacagcagatcttcaacgagtgcttcatgagcggcaagagagtgacccggaagcagctgtgcaagcacctggaaatgtggggaaagatcaagagcgaggaccaggtgtccggcatcgacatcaccatcaatcagagcctgagcagctacggcaagatgtacgccatctttggcgaccagctgaaagaggacaagtacagagatatcgccgaggacatcatctactggggcaccgtgttcaccgacagcaagaagatgtacagagagcacctgaaccggtacatcgagtctggcgatctgaccgagagcgacgtgaagagaatcctgggctacaagttcaaggactggggcagattcagcagagccctgctcgaactgcagggctgtgataagagcaccggcgaaaaggtgtcactgctgcaggccatgtggaacaactccctgaatttcatggaactgatcaacagccccgacttcacctttagagaggccctcgaagagaagcaagtcaacctggaaaagaccctgaccgacttcgagtatgaggacctcgagtgctactacttcagcgcccctgtgaagcggatgatctggcagacaatcctggtcgtgcgcgagatcgaaaaagtgatgggacaagcccctgccagagtgttcgtggaaatgacccgcagcgacgaggaaaagggcgagagaggcagaaaggcctctagagcttctcagctgctgctggcctacaagaacatcaagaacacccagattcgcgactggaaaaaagagatcagcgaggccgaaggcaacggcaagctgagatccaagaagctgtatctgtactacatgcagatgggcagagacatgtacaccggcaaagagattgacctggctcggctgttcgacgacaatctgtacgacatcgaccacatctaccccagacactacgtgaaggacgacagcatcatcaacaatctggtgctggtcaacaaggccgccaacgaacacctgaagaaggatctgtaccctattcctgctcagatcgcaagcaaccccgaagtgcgagaactgtgggatgccctgcacagagccaagctgatcaccgacgaaaagtaccaccggctgaccagcagagagcagtttaccgatcagcagatgggagactttatcgcccggcagctggtggaaacaagccagggaacaaagggaatcgccgagctgctgaaagccctgctgcctgagacaaccgagatcatctacgccaaggccagcaacgtggccgagttcagacacaagaatggcttcgccaagagcagactggtcaacgagttccatcacgcccaggacgcctacctgaatatcgtcgtgggcaacgtgtactacaccaagttcaccaagaatccctggaacttcatcaagaatgactacgagaaggataagcagaaataccactacaacatggaccgcatgttcgactgggacgtgacaagaggctctgaggtggcctggatcgtggacagaaaggacagaagaggcaccatcgataccgtgcgggaaatgatgagaaagaacacacccctgatgacccggatgagcttcgagcagcatggcggaattgccaacgccacactgtacagcgccaagaaagtgaaaaccgagggctacttcccactgaaggcctccgatgccagactgagcgacattaccaaatacggcggctacacaagcgccacaatcgcctactactttatcgtgcggtacaagaagggcaagaaagaaatcatcagcgtggaaggcctgcctatcctgttcaaagaaaaggtggaacggaccgccaacggcctggaaagatactgtacagagcagctgggatacgagaatgtgcagatccggtgcaagaaactgagaatccagagcctgctggaaatcaacggctaccggatgtacctgtctggcaagaccggcaaccagctgatcatgagaaacgccaccaacctgtgcctgtccgacaaacagatccgctacatccggaaaatcgagaagttcagcgagacagaggtgctggacgaggtgctgtgcgaagccgtgaacatccagctgtacgatgccctggtcgagaagcacatgcacaccatctatgccaagaggcctaatgccgtcggcggaaagctggaaaaggcccggaagagatttgtcgagctggccgtggatgaccagtgcaaggtgctgtatcagatgctccagctgaccaagatcggactgatcagggccgacctgacactgattggagagtctgcccataccggcgtgatgctgatctccaaaaaactgaagcagaccgacagcgtgtacctggtggaacagagcgtgaccggcctgtacgagaagaagagatccctgtccagcctgagcggatcc

SEQ ID NO: 242 - DNA, 4008 bp, Artificial Sequence
  OMNI nuclease sequence
ggtaccgaaaagttctacctcggcatggacatcggcaccaatagcgtcggcatggcctgcaccgacgagaactatagactgctgagagcctgcggcaaggattgctgggccgtcagactgttcgatgagtctcagacagccgccgagcggagagtgtctagaacagctagaagaaggctggccagacggaagcagagactgggctttctgcagaccctgttcgccccttatatcgccgacaagaccttcttcatccggctgaacaacagccagttcctgagcgaggacaaggacgagcggctgaagaaggacatcaacaccctgtttgccgacgacggcttcaccgacaaggactaccacaagaagtaccccaccatctaccacctgagaaaggccctgatgaccgaggacatcagcgacatgagactgtactatctggccctgcaccacatcgtgaagtaccggggccactttctgtttgagggcagcatggccgacatccgggacatgaccaagctgatcttcgacctgaatgccgcctgcgccgacgtgttctttgaggatgcccctagcttcaacgtgtccgtgtgtggacaggccaaggctctgctgatgagcgtggaacggaacaagaacgccaagctggaagatattttcggcctgcacgacaagcgggccaaagagatcatcaagggcatctgcggctacagcgtgaagcccagcacactgttcagcgagcggtacaaagaggaaaagagcttcagcttcaaggacctgaccgacgaaaccttcgatggcatgcaggccgtgtacggcgacgattttgccctgctgacagccatccgggccatctacaactacatcaccttcgagaagatcctggaaggccaggccgatatcagcagcgccatggtcaacatctacgagaagcacaagcgggacctgaagaagctgaaagacttcctgctggaaaacgccaccagagaagagtacaaccggttcttcaagtccgtggaagagggcgccaactacgtgaactacatcggctacaccaagaaaggcggcgacaagaaaaaagtgaagcactgcaaggacgaagagttcttcgcctacgtgaagaagttcatcctgagcctgaagggcgtgaaggatgagatcgccgctgccgagtttatcagcgaagccgaaaatggcgccctgctgcctaagatcctgcacgccgataatggcctgtttccacaccagatcaacgaggacgagctgaacaagatcgtggccaacatggtccgaaactgccccgagacagacgagatctctgagaagatcgcccctgtgttcctgttcagaatcccctactacgtgggccctctgaccggaaaaaactcctgggccgtgcgcgagaaggacaagatcaccccttggaacttcaaccaggtggtggacctggccaagagcaacgaggccttcatgcggcagatgaccaacaagtgcagcattctgcacggcgaggatgtgctgccaaaggccagcatctactaccagagatacaacgtgctgaatcagatcaacaagctcaagaagaacgacgtccccatcgacgtggaaacgaagcagaagatctttaacgagctgttcctgaccaggcggaaagtgaccgacaacgccattaaggacgtgctcgtgcggagcggactgatctccgaggccgagaagaaacaagtgaccatctctggcaaggacggcgagctgtcagccagcatgtctagctacatccagctgaaaaccatcctgggcgacttcgtggaccaggatctgctgtgtggcggagaagtgtgcgagaagattatcctgtggcacaccctgaacaccgataagaacatcgtggtcgagctgattaacaagaactacgggcacatccctcagatcaagtccaacatcaaagccctgaaaggcctggtgttcaaggacttcggccggctgagcaagaaactgctgaccggcctgtgctttaccgacaatcagacaggccaggtgtacagcgtgctggacctgctgtacgagacaaacaagaacctgaacgagatcctgttcgacaaggattacggcttcgaggacatgatccgggaagagaacggcgagaacgacaccaaggtggactatgaggacgtggccaagctgtacgtgtccccatctgtgcggagaggcatctggcagtctctgaagatggccgacgagtacgtggaaagaatcggcaaggcccctgacaagatcttcattgaagtgacccgcgaggaaggcaagaagggcgacgctggaagaaccgtgtccagacagaaacagctgctcgagaagtataagggcatcgagggaatcagcgagctggacgccgaactgaaagagaaaaccgacctgcagctgagacaagagcggctgtacctgtacttcagacagctgggcaagtgcatgtacagcggcgagagaatcgacctggaactgctgaacaccaacagatacgacgtggaccacatcctgcctcggacatacgtgaaggacgacagcctggacaacaaggtgctggtgctgagagtgaagaacgcccagaagtccgatcagtaccccattcctttcagcctcgtgaccgatgaggccagaaatcactgggccgttctgagagccaagggcctgattagcgagacaaccctgaaccggctgaccagaacagagcccctgaccgagaacgatttcaacgacttcatcaaccggcaaaagaccatcaccgaccagacagtgaaagccgtggccgagctgctgagcagaaagtaccctaccgccaagattgtgtacagcaaggccaagaatgtgtccgacttccggcagaagttcgacctgttcaagtgcagagagactaacgatctgcaccacgccagggacgcctacctgaatgtggtcgtgggcaacgtgttcgatacctgcttcagcacccctttcgccacctactacaaggatggcgacaagtggcgcgagtacaatctgaaaacaatgttcgcccggaacgtgaaaggcgcctgggtgcaagataatgcccagagcatctctatcgtgaagcggacagtgcagaaaacctccatggccgtgaccagatacgcctacagaaacaaaggcggcttctacgaccagaccgtgtatggcaagcacgacgcctctatcacagcccctagaaaagagaatggccctctggccgaccacaccaaatacggcggctacaagagccagaaaaccgcctactttgccatcgtgcagtccaacgataagaaaggccggaccatcaagaccatcgaggccgtgcctatcatgatcgactaccagtccgtgaacaaccccgacagactgagcggctacttcgccacatatctgaacgagcccaccgtgatcgtgcccaagatcaaagtcaagcagctgatcaagttcaacggcaccctgtgcttcatggccggcatcacaggatctagcatcatcctgcacaacgccgtggaactgttcaccgataacaagacggatgagtacctgaaagaggtggtcaagctggtcaacagcgccaagtccggcagcatcgatacaaccctggccgagtatgtgatgaagaccaacaaagacggcgtgatcaagctcgtgatcgacagcgagagaaatgtctccgtgttcaacctgctgatcgacaagctgcggagcagcagatatacaggcgtgggagccgccatcacattctgcaagacactgatcgctggcgccgagaacttcaaggccctcaagacatttgaccaggccgtggtgctgctgcagattctgcggttctttaagtgcaacgccgagctgagcgatctgtccctgatcggcggacctagattcatcggagtgctgcgcgtgaacaagaatatcaccgagatcgacttccgcatcgtgcaccagtctccatgcggactgtttgagtgcgagcagaaggtgggatcc

SEQ ID NO: 243 - DNA, 4194 bp, Artificial Sequence
  OMNI nuclease sequence
ggtaccgaaaagaactacttcgtcggcctggacatgggcacaagctctgttggatgggccgtgaccgacgagaactacaacctgatccggaagaaaggcaaggacctgtggggcatcagagagttcgaacccgccaatactgcccaagagcggagagccaaccggatcagcagaagaagaaggcagcgcgagctgatcagactgggcctcgtgaaggattacttcgccgatgccattgccaccgtggacagcagcttctaccagcggctggaaaacagcaagtactacctggaagataaggacgaggacgtgcggaccagcaacggcatcttcaacgacaaagagtacaaggacaaggactactacaaagaataccccaccatctaccacctccggaaagagctgatcgagaacaagaacaagccctacgacgtgcggctggtgtacctggccatcagcaacctgttcaagcggagaggccacttcctgaacaacagcctgaacgtggacaacggcaagttcgacgtgaacatcaaagaggcctacgaggaactgctgaacagcatcagcagagccttcagcgacgatgagagcgagagcctgaccatgcctgtgatcaacgaggactgcgtgtacaaagagctggaaaagatcctgggcaacagagactacagccggaagtacaaggccgagaagatccgggacctgctgaatatcgacaagaaggccaagaagcagaacgaagtcatcaacggaatcgtgggcctgaagatcgactgctgcaaggcctttggcatcaccgacagcgaagagaagatcgaggccaagttcagcgagttcggctacagcgagaaagagcccggaatcctcgaactgctgggagatgttctgggcgaagtgctggtcaacatcaagcggatctacgacgccggcacactgacagagctgctgaagggctacaactacctgagcttcgccagatgcagcgactacgagaagcacaaagaggacctgagactgctgaagatgctcgtgaagaagtaccagcctgagcagtttgacagcatgttcagagacacccacgacggcagctacagcgcctacgtgaacagcagcaatagcgagaagtacaactactccgagaacggcatcaagaagcccaaccggcggaacatggacaagagaagcaaggccgacttctacagcacagtgaagaagatgctgagccccttcgccaacgaggatgagagagtgcagaccatcctggacgagatggaaaacggcaccttcatgcccaagcagctgaacggcgataacggcgtgatccctaatcagctgcacgccatcgagctgaaagtgatcctgcagaacgccagcgagtacctgcctttcctgaacgagatcgatggctctggactgagcgtggccgagaggatctacaagctgttcaccttcacactgccctactacatcggccccaccaccgagaagtctaagacaggatgggttgtgcggaacaagggctacgagaatacccacgtgctgccctggaacatgaacgacgtgatcgaccaagagaaaacccacaaagagttcatcgagcggatggtccgacggtgcacctacatgaacaacgaacaggtgctgcctaagaacagcctgctgtacgagaagttctgcgtgctcaacgagatcaacaacatccggatcgacaacgtgcgcatcgacaacaacctgaagaaaaccatctacaacgagctgtacaagaaggggaagaaacccactctgaagaagctgcacgactgcctgatcctgaatggcatctctgagtctgcccagatcaccggcatcgacagagagattaacaactccctggccagctacggaaagttcgcccctatcatgggcgagctgctggacaccgatgatggcagaaaggtggtggaagatatcatctacaccttcaccatcttcggcgacgatcggaagtacctgaaagagtacctcctgaacacataccccgagaacgagtacccctacatgaccctgagcaatatcaagcgcatcctgggcttcaagttctccgactggggcagattcagcaaagaactgctcatgctcgaggggtacaacagagagacaggcgagatctacaccctgctggatgccctgtgggaagagaattacaacttcatggaactgatcaacagccccgtgttcagcttcaaagaatctatggacaagctcgagaagaacaccctgtccagcctggccgaactggatgttgaggtgctggaccggtactacttcagcgcccctgtgaagcggatgattctgcagaccaacggcgtgctgaaagaaatcgtgaaagtcatgggcggagcccctagaaagatcttcatcgagatgaccagaagcgacgagcagaagggcgacgccggaagaaccagctctagaaagaagcagctcctggacctctacaagaacgtgaagcaagaggtggccgaccggaagtattggagcgatctgatcgagcacgagagcgaaaccggccggatcaagagcaagaagatgtacctgtacatcaagcagatgggctgcgacatgtacaccggcgagcccattgatctggacgagctgtttaccaacagatacgacatcgaccacatctaccccagacactacgtgaccgataacaacattgagaacaacctggtgctgaccaacaaggccagcaacgagcacatcaagaaagactactaccccattcctgagaagattcggaacaaccccgccacaatcgagctgtgggacagactgcacgctaacggcatgatcaatgacattaagtacgcccggctgcggtgcaaagaagagttttctgacgagcaaaaggccaactttatcgcccggcagctggtggaaacaagccagggcacaaagggcatcagcgatctgctgagacagatgctgccaaccagcgagctggtgttcgtgaaggccaacaacgtgtcccggttccggcagaacaaaggcagacggcacaagaacggcgacaacagccctgtggaaggcttcagcaagagccggctgattaacgatttccaccacgccaacgacgcctatctgaacatcgtcgtgggcaacgtgtaccacaccaagttcaccagcaatccgctgaactacattaagaaggactaccgccaaaacaaagagaacttcgagtacaacctcggccggatgttcgagacaaaggtcgtgcggaatggctacgtggcctggattcctgagggcaacaaagaaaacctggaacctaccatcaacaccgtgaacaaagtgatgagccggaacacccctctgtacaccagaaaggccttcgtgaagcccggcatcgtcaacaaagtcacaatctacggcaagaggaaggccacacctgagcggtacatgcctctgaagtccggcgatccaaagatcgccgacgtgaccaaatacggcggcatgaccagcatctccatctgctactattttctggtggaacacgaagtgaagggcaagagaatccggaccattgagggcctgcctggctacatgcacaccagagtggaaaacaaccctgacgagcttgagaagtactgcagggacgtgctgaagctcgtgaacttcagcatccggtatcggaagatcagaatccagagcctgctcaaagtgaacggctacagagccaatctgagcggaaaaaccggcgacgccctgattctgagaaacgccgaacctctgtacctgccagacagataccaggactacattgcctatctggaaaagcactccgaggaagagtaccacgacaagctggacaaagaagtgaacatccagatctacgatatcctgatggaaaagttcaaggacggcatctaccggaacagggccaagaccgtgggcaatatcatgtccaacggcagaggccagttcattgagctgagcgtcgagaagcagtactttgtcatcaatgagatcctgaagctgaccaccatcggcacccttacagccgctttgggcgatatcggcggcagatccaacaatggcaagtttaccgtgggaaagaagatcagcgacctggacagctgccagctgatcaataccagctacaccggaatcttcaacagcgccccaatcgacctgaaaaccgtgggatcc

SEQ ID NO: 244 - DNA, 4080 bp, Artificial Sequence
  OMNI nuclease sequence
ggtaccaacaacaaagagtacttcctgggcctcgacatcggcacaggatctgttggatgggccgtgaccgacacacagtacaacctgatcaagatcaaccggaagtacgcctggggagccgtgctgtttgatacagccaaaggcgccgaagaacgcagagtgaacagatgcgccaggcggagataccagagagagaagcagcggatcaacctgctgcaagagctgttcgaggaagagatctacaaggtcgacagcggcttcttccaccggctgaacgagagcagatacgtgtacgccgacaagcgggatgagaagggcgagaagcctgagctgccttacagcctgttcgtggacgagaattacaccgacgtggactaccaccgcgagttccctacagtgtaccacctgagaaaggccctgatgaccgaggacagagcctttgatgtgcggctgctgtatctggctatcgcccacatcatccggaacagaggccacttcctgagcaacatgggcatggacgaagtgaacctggacttcagcaagatcttcggcgacctgatgaactgctggaaagaaaacatggaagatgagagccggaacagcgtgctggaactggaaaacgagacaatcgagaacatcgagaagatcatgaagaacagcgagctgaccaagaccgccaagaagcagaagattctggaagaactgagcggcttcagcaaagagttcaaagagctgatcgccctgatcaccggcggcaaagtgtctctggccaagctgtttgacaagaaagagtatgacaccctcgagatcgacaagatctgcttcgacgaggccagcttcgaggaaaatgaggaaatctacgccaccaacctggacgactacttcgagatcatcaccaaggccaaggccgtgtacgactggatgatcctgtccaacatcttcaaggacgacaagagcggctacctgagctgtgccaaggtggccgattacgagaagcacaagagggacctgaagaacctgaaagaggccatcagaaacgacagcatcggcgacgaagaggacaagcggaacctgtacaagcagaccttcggcgtgcccaagaaaggcgaggaaaactacagcaagtacatcggcatgaccgccagcaagggcagcaagtttgtgatcgatggcgccaagtgctctaagtacgacttctacaagttcgtgaagaagaacatcatccccaagctgaaggatggcgagctgaaagagtacattgagaaagagatcagcctcgagagcttcatgcccaagaccagagtgaaagagaacgccatcattccctaccagatccacgccaaagaactgaagaaaatcctggaatgcgccgaggcctacatgccctttctgaaagagagggacgactccggcaagaccgtgtctgagaagattatgatgctgctgaccttcagggtgccctactacgtgggacctctgaatactgccagctctcaggcctgggtcaagagaaatggcaccggcagagtgaccccttggaacttcgagacaatgatcaacgtggacctgagcgccgagaagttcatcgagagaatgaccagcaagtgcacctacctcaagaacgagaaggtgctgcccaagagcagcctggtgtacgaagagtatatggtcctgaacgagctgaacaagctgcagatcaagagcgagcccatcagcgtcgagctgaagaacgacatctaccacgacctgttcgagcggaagctgaaagtgaccctgaagaaactggtcgactacctgaagagagaaaagggctacaccgacatcaccaaagaggacatctccggcatcgacatcgacttcaagtccagcctgaagtcctaccacgccttcaagcgcgagttcaccgatgtgaatctgagcgagagcgagaaagaggatatcatcaaggacatgaccctgtttggcgccgagcctaagctgctgaagaagagactgtacgccaagtttcccgactacgagagccagctgaacagcctgattaagagcctgaactgcaacggctggggcagactgagctacaaactgctgaacggaatcgccgtggaaatccccggacaaggcatggtcggaacagtgctgtaccagctgcggaacaccaacaacaatctgatggaaatcctcgagaagtctggcagcccctacgccaagctgatcgaagaggaaaacaagaccgacgacagccacaagatcaattacgagctggtcaaagaactctacgtgtcccctgccaccaagcggcagatttggaaagccatccaggtggtggaagagattagccacgccatgggacaccctccaaagcggctgtttgtggaaatggcccgcgagcacatggaaagcaagcggagcatcacccggaagaacaagttgctggatctgtacaagagcatcaagaatgagaaagaactgtacgaggaactgaagggccagcctgaggataagctgcggagcgataagctgtacctgtactacacccagttcggcacctgtgcctacaccggcaagaagatcgagctgagcgagctgttcaacaacaacctgtacgatatcgaccacatctaccctcagagcaagacagccgacgactccctggacaatagagtgctcgtgtgcaaggacagcaacggctacaagagcgacgtgtaccccatcgacagcgacatccagaaaaagatgtggaacatttggtatctgtggtactccaagggcctgatctccaaagagaagtacaagcggctgacccggacctccgagctgacaaatgatgagctgaccggcttcatcaaccggcagctggtggaaacccggcagagcaccaaagaaattatgaagctgatgcggcagctgctgcccgacacagagctggtgtattctaaggccggcaacgtgtcccggttccggcagaagtataagatcctgaaagtgcgggaactgaacgattaccaccacgccagagatgcctacctgaacatcgtcgtgggcaacgcctatcacctgagattcaccaaggacatccgcaactactttatgaagtacggcacctaccggacctacaatctcaagaagatgttcgagaaggacatcaccttccaagaggaagtcgcttggagagccggcgagagaggaacaatccagaccgtgctgcgcttcatgaactgcgacaaggtgctggtcaccaggcagacctttgagaggaaaggcgccctgttcgacgtgcagcctaagaaaaaaggcgaaggccaggtgccaatcaagtccggcatcaacaacgagagactggccgtgatcgagaaatacggcggctacaatggcgccaccatcagctactttaccctgatcgagggcctgaaaaacaacaagaacaagaagcggtatatcatccccgtgcctctgtacctctgtcacaagattgagaaggacgagctgtatgccaagcagttcttcgaaaaagagagcaagctcagcaacatccggatcattcggaagatcctcatccagacactgatgatcgacgagggcttcaagatgaggctggccggcaaatctggcacccagctgatcttccacaacagcaacgagctgtccctgaacaagaaacacttcaagtgcctcaaagagatcgagaagtttatcctggaccggaaggacaagcccgacgccacaatcaatgagaagtccgagctggccggaaaccagatgctggacatctacaatatcttcatcgacaagctgatgaacagcgtctactctaaagagctgggcaagcacggcgagtttctgaacaacggcctggaacagttcaacaagctgagcctcgaggaccaggccattcagctgcacgagctgctcaagttctttcagtgcacccctgagatgcccgacctgtctagagttggcggctctaagtccatcggcgccatcaggtctagcatggacgtgaccaagagatccaagctggccatcatccaccagagcgtgaccggcatctacgagaagattgagcgcatcaacgagggatcc

SEQ ID NO: 245 - DNA, 4074 bp, Artificial Sequence
  OMNI nuclease sequence
ggtaccaaggaacgcgagtacttcctgggcctcgatatgggcacaggatctgttggatgggccgtgaccgacaccgagtacaacctgatcaagatcaaccggaagcgcgcctggggcagcgtgctgtttgaaacatctaagggcgccaaagagcggcgggtcaacagatgtgccagaagaaggctgaagcggcagaaagagagactgaacctgctgagagagctgttcgaggaagaggtgcagaaggtcgacagcggattcttcctgcggatgaaggaatccagatacgtgtacgacgacaagcgggacgagaacggcgtgaagcctcagctgccttacagcctgttcgtggacgagaattacaccgacgtggactaccaccgggacttccccacaatctaccacctgagaaaggccctgatggaagaggacagaaagttcgacgtgcggctgctgtatctggctatcgcccacatcctgaagaacagaggccacttcctggccaacatgggcagcgacgaagtgaacctggacctgaaagagagcttcaaagccctgctggacaagtggaacgagatgatgaccgacgacgagatcatgagcgtgacagccggatctgagcagctggaacagatcgagaaaaccctgaaggacacccggatcgtgaagtccagcaagaagcaagagatcatcaacatcgtgggcaccagcgacaagagattcaaagagctggcctctctgatcgctggcggcaaggtttccctgagcaagctgtttgaccggaaggactacgagagcctcgagatcaacaagatcagcttcgacgacgccagctacgaggaaaacgaagagtactacgccgccaacctggaagataactacgacatcattgcctgcgccaagaacgtctacgacggcatgatcctgagcaatatcctgaagggcgacgagagcggactgatctctgccgccaaagtgaaggattacgacaagcacagaaaggacctgaggctgctgaagagagtgatcctggaagaaggcatcggcgaggacaagcagcggaagatcctgtacaagcgcgtgttcggcgtgaccaagaaccaggacaacaactacagccgctacgtgggcgtcgtgtccacaaagggaagaaagggcgtgatcgaggataagaagtgcaccagagccgacttctacaacttcatcaagaaagagatcctgcctgagatcaaagagggcgacaacaaagagtacattaagaacgagatcgaggccgacagcttcatgcccaaggccagagtgaaagaaaacagcgtgatcccctaccagctgcacaagaaagaactgaagaagattctgcggaacgccgagaagtatcacccgtttctgaaagaaaccgacgagacaggcaagagcgtgtccgagaagatcatcatgctgctcgagttcaagatcccctattacgtgggccctctgaacgtgtccggatctaatgcctgggccgtgcggtctagcggaaagatcaccccttggaacttcgaggaaaaagtgaacatcgaggaatccgccaagaatttcatcgagaagatgaccagcaagtgcacctacctgaagaatgaggacgtgctgcctatgagcagcctgacctacgagaagttcatggtgctgaacgagattaacaaaatcaagattaacagcgagcccatcagcgtcgagctgaagcaggatatctaccacgaactgttcgagaaaaagctcaaagtgaccgtgaagcggctgatcgattacctgaaggccgagaagggctacgccgacctgaaaaaagagggcatcagcggcatcgacatcgagattaagtccagcctgaagtcctaccacgccttcaaagaaaagttcaccggcgtgaacctgagcgagaaggccaaagaggacatcatcaaggacatgaccctgtttggcgccgagcctaagctgctgaaaaagaggctgacaagcaagtaccccgagtacgagaaccagatcaacagcctgatcaaatccctgaagtgcaaggactggggcagactgagctacaaactgctgaacggcctggccatcgatgtgcctggacagggaatgatcggcaccgtgatgtaccggctgtggaacaccaatgagaacttcatgcagatcatcgagagcagcgacagcccctacgccaagctgattagagaagagaatggcgaggccagaaagaagggcatcgactacagcctggtcaacgacctgtatgtgtcccctgccgtgaagagacagatctggaaggccctgcaagtgaccgatgagatcatgcacgccatgggcaagcctccaaagcgggtgttcgttgagatggccagagaggaaggcgagaagaaacgcagcgtgacccgcaaggatagactgatcgagctgtacaagagcatcaaggatgagaaggccctctacgataagctgctcaagaccgacaacgacgccctgagaagcgacaagctgtacctgtactacacacagctgggcaagtgtgcctacaccggcaagaagatcgagattgacgagctgatgaacaacaacaaatacgacatcgaccacatctaccccagatccaagaccgccgacgatagcctggacaacagagtgctggtgtacaagcctgtgaacggcgacaaggacgacagattccctctggacggcaagatccgcgaggacatgagaaatacctggctcgtgtggaagcagaagggcctgatcagcgaggaaaagtacaagagactgacccggaccaccgagctgacctctgaggaactgctgggcttcgtgaacagacagctggtggaaaccagacagagcaccaaggcctttgccgaggctctgagatatgtgatccccgaagaaacagagatcgtgtacagcaaggccggcaacgtgtcccggttcagacagcagtacaagatcctgaaagtgcgggacatcaacgatctgcaccacgccaaggacgcctatctgaacatcgtcgtgggcaatgtgtatcacctgagattcaccaaggacgtgcgcaagtacttcgaccggaacggcacctaccggacctacaacctgtaccggatgttcgacttcgacgtgaactacagcttcgagatggcctggaaagccggcaaggacggcaccatcatcaaagtcaaagaaaccctcaagtgcgaccgggtgctcgtgacaagacagacatatgaagccggcggaaaactgtttgacgtgcagcccaagaagaaaggcgacggacaggtgccactgaagtctggcaagaacaacgagaggctgaacaacatcaatctgtacggcggctacaacagcgccagcatcacctactttgtgctgatcgagggcaaagacaagaaggataagctgagcaagtatatcgcccctgtgcctctgcatctcaagaagaagctcgaagaggacgagaacttcgccaagaagtactttgccgaagagtataagctgaaggacgtgaagctcgtccgcaagattctgatccagacactgatggtcaccgacggcttcaagatgagactggccggaaagagcggaacccagctgatcgtgcacaacgccatccagctgattgtgaacgagaagtactacaagccctttaaagaaatcagcaagttcatgcaggaccagaagcagaaaaaggggatcagcatcaaccagaactccggcatcacagacgaggccctggtggacatctactacatgcttaaagaaaagctggaatgcagcatctacaaggggctgcccgacaacttcaagaacatcatggaaaagggaatcgacaagtttaaagagctgagcatcgacgagaaagccgtgcagatctacgaactgctcaaactcttcgagtgcacctccgagatgcccgacctgtctagaatcggcggaggaaagacaagcggcgccatcagaatcagcatgaacgtgaccgagcggaagcacctgagcatcatccatcagtccgtgaccggcatcttcgaagtgatcgagcggatcaacggatcc

SEQ ID NO: 246 - DNA, 4170 bp, Artificial Sequence
  OMNI nuclease sequence
ggtaccgaaaagaactactacatcggcctggacatcggcaccaattctgttggctgggccgtgaccgatgagaagtacagcgtggtcaagaagaaaggcaagcggctgtggggcgtcagactgtttgatacagccgccaccgccaagaagcggagactgaaaagaaccgccaggcggagatacctgcggcggagacaaagaatcgacctgctgcaagagctgttcgcccctctgatcctggaacgggacgagaacttcttcagacggctggatgagtcattcttctttgaagaggacaagaaggtggacggcaagtacagcctgttcagcgacaagaactacaccgacaaggacttctacaaagagtacaagaccgcctaccacctgagaaaccggctgatcaagggcgacatccccgacgatcctagaatcgtgtatctggcctgccaccacatcatcaagaagaggggccacttcctgttcaacggcgagatcaacggcaacaacatcagctgcgacaacgagatccggggcctgcagaaattcgtgaccgacggcaatgaccacgacgtgccaatgttcggcggcgacaacttcaaggatttcagcctggacgagttcgtgaagatcatcaccctgaccgacaccagaagagagagcatcgagaaaaccaccgagctgtttggcgtgtccgatggcaagtacctgaagaacgccgtcagagtgatgttcggctacaagcagaaagtgaaaaccctgttcgccagcgagtactacggcgactgcgatatcgagatcgacttcaccagcgagcagtacgaggaaaccagcgaggccctgaagatcgagctgggcgacgactacagctacgtggacaccctgaagaatctgtacgacttcgtggtgctgaagcggctgctccaagagcactctagcatctccgaggccatggtgtctaagtacgagagacacgccgtggaactgcggatgctgaagaacatcgtgcggaagtacggcaagacctccgactacaatgagattttcaaagaaaccgtgtccgacgccagctacgccaagtacatcggcatgaacaagaaaggcggcgtgaagcaagtgaccgagagagagagcgcctactcctacgagacattctacaaggccctgctgggcaagctggacagcatcgtgacagataagagcgacgccgactacctgtgcatcaagaaccggatcgagaacaaagacttcctgatcagatacgccagcagcgtgaacgccagcattcccaaccagctgcacagggacgagctgaacagaatcctggacaacgccagcgtgaagttcccctacctgctggaaaaagatggcgacggcctgagcgtgaaggacaagatcatgtctatcatgacctacaagatcccttactacgtgggccccattcctaacgacgagaatagcgaggccatcggcaagtatagctggcttgtgcggaaagaaagcggcaaggtgctgccctggaacttcgagaagaaagtggacatgaacgcctccatggaaaagttcatcaagagcctgatcaaccggtgcagctacctgaacaccgagaacgtgctgcccaagcagtccctgatctaccaagagtatgaggtgctgaatgagctgaacggcatcaagttcaatggcaagcggatcgacaatgagacaaagctcaagatcttcgaggggctgttcaagaactccggcaagaagaagatcaccgagaagatcctgaaggcctttctggtcaacgagaatgtggtgtccaagagcgacatcaacgccctgaaaattgacggctaccagaaggacaaagagttctccacctgtctgagcagctacgtcaacatcgtgaaggccctgggcaacgacttcgacagaggctatgtggacaacaatatcgacaccttcgagcggatcatcgagctgagcaccgtgtacgccgacaacaagtccctgttcgtggaaaagctgaagcaagagttccccgctctggacgagcgcgtgatcgctaaagtgaagggcctgaccttcacaaagtggggcagactgagcaagagactgctcgtgggcgttgtggcctctaataccgctacaggcgaggtgtccaacatcctgagcctgatgagaaacaccaacgccaacttcatggaaatcatcttcgacaaagagtggaacttcaacgccctcatcgaggaagagaacaagagcgtcagccggcagatcgataagatcaagtactccgatatcgccgagctgtactgcagccctagcgtgaagagagccatctggcagagcatcaagatcgtgcgcgagatcgtggaaattatgggctaccctcctaccaagttcttcgtggaagtgaccagaagcgacgaggataagaagagaaccagcagcagaaagagcgtgctgcagaaactgtacaaaggcgtggacgacagcggagacatcaaggccatcaaagaggccctcgagaaagagaatgagaacagcctgaaggacgagcggctgtacctgtactactctcagcagggcaagtgcatgtacaccggcaagcccatcaacatcgacgatctgctgaacaccaagctgtacgacatcgaccacatctaccctcagagcatgaccaccgacgagagcgtgcaccggaacaaggtgctcgtgtgtagaagcgccaacaaggacaagtccgacgtgtaccctctgaacatcgaggtgcagaacaagatggccggcttctggaagtccctgcgcgacaaagagtttatcacccctgagaagtacatccggctgacccggaaagagcccctgacagacaaagagctgggagactttatcgcccggcagctggtgtttaccagccagtccgtgaaagaagtgatcaacctgctgaagattgagtaccccaacagcgagacatgctatgtgaaggccgaggtggtcaaggactttcggagccggaacaactatctgaagatccggacactgaacgacctgcaccacgccaaggatgcctatctgaacgtggtggccggcaatatcctgagcacagccaacaaaaacaacttccggatgcagcggatcaacaagggcaatgagatcgacacggacatcattaagaattacagcatcagcaacatcttcagccggggctacgtggtgtctacagccaagaacctggcctggaattgcgacctgttcgacaacgtggaaaaacagtactaccggaacgacatcctggtcaccaagatgcagacagtcggcaagggcgccttctacgacgagacagttagaaagagcctggccaacgctaagtacgccaaggccgccagaaaagcctccattcctctgaaaaaagtggaaggcaaccggtactccatcgagagatacggcggagtgacaaccgtgtctccacgttggttcgccctgatcggctgctctgacaagaagaacaaccagatctaccgcatcgagccgatcaatatctacgattacgccaagatggacaagagccgcatcaaggacgagatggcctctctgctcgagagacagggccacaagaatgtggatatcattgccatcctgaagaagaataccctgctgtccatcgacggaaatcggtactacctgacaggcaccagcggcgagagcctgacactggataatgccaagcagctgaccgtgggcagagaatacgagctggccgtgaaccggattctgaagtacacagagaaccccaagagaaacaaggacgtgaccgaggtggccatccgcagcaagagcaaagaggactacaacattgacgagaaggccgtgttcgtgatgctggtcgacaagctgaaaaccgagtttccccagttcagagtggtggcctccaagttcgacgatgagtccatcgaggccttcgacaccgccagcaagtctagacagtgcgagatcattaccaacattatcaagatgaccgggtgcaacagcacccggggaaaactggatggcgagcccttcaatgccaatttcaaggcctctgagggcgctctgaccgctaacaaaaaggtgtcctacgagctgacagtgatcgaccagagcgtgacaggcgtgtacgagtactccaagtctatcaagaagggatcc

SEQ ID NO: 247 - DNA, 4170 bp, Artificial Sequence
  OMNI nuclease sequence
ggtaccgaaaagaactactacatcggcctggacatcggcaccaattctgttggctgggccgtgaccgatgagaagtacagcgtggtcaagaagaaaggcaagcggctgtggggcgtcagactgtttgatacagccgccaccgccaagaagcggagactgaaaagaaccgccaggcggagatacctgcggcggagacaaagaatcgacctgctgcaagagctgttcgcccctctgatcctggaacgggacgagaacttcttcagacggctggatgagtcattcttctttgaagaggacaagaaggtggacggcaagtacagcctgttcagcgacaagaactacaccgacaaggacttctacaaagagtacaagaccgcctaccacctgagaaaccggctgatcaagggcgacatccccgacgatcctagaatcgtgtatctggcctgccaccacatcatcaagaagaggggccacttcctgttcaacggcgagatcaacggcaacaacatcagctgcgtgaacgagatccggggcctgcagaaattcgtgaccgacggcaatgaccacgacgtgccaatgttcggcggcgacaacttcaaggatttcagcctggacgagttcgtgaagatcatcaccctgaccgacaccagaagagagagcatcgagaaaaccaccgagctgtttggcgtgtccgatggcaagtacctgaagaacgccgtcagagtgatgttcggctacaagcagaaagtgaaaaccctgttcgccagcgagtactacggcgactgcgacatcgagatcgacttcaccagcgagcagtacgaggaaaccagcgaggccctgaagatcgagctgggcgacgactacagctacgtggacaccctgaagaatctgtacgacttcgtggtgctgaagcggctgctgaaagagcacagcagcatctccgaggccatggtgtctaagtacgagagacacgccgtggaactgcggatgctgaagaacatcgtgcggaagtacggcaagacctccgactacaacgagattttcaaagaaaccgtgtccgacgccagctacgccaagtacatcggcatgaacaagaaaggcggcgtgaagcaagtgaccgagagagagagcgcctactcctacgagacattctacaaggccctgctgggcaagctggacagcatcgtgacagataagagcgacgccgactacctgtgcatcaagaaccggatcgagaacaaagacttcctgatcagatacgcctccagcgtgaacgccagcattcccaaccagctgcacagggacgagctgaacagaatcctggacaacgcctccgtgaagttcccctacctgctggaaaaagatggcgacggcctgagcgtgaaggacaagatcatgtctatcatgacctacaagatcccttactacgtgggccccattcctaacgacgagaatagcgaggccatcggcaagtatagctggcttgtgcggaaagaaagcggcaaggtgctgccctggaacttcgagaagaaagtggacatgaacgcctccatggaaaagttcatcaagagcctgatcaaccggtgcagctacctgaacaccgagaacgtgctgcccaagcagtccctgatctaccaagagtatgaggtgctgaatgagctgaacggcatcaagttcaatggcaagcggatcgacaacgagacaaagctgaagatctttgagggcctgttcaagaactccggcaagaagaagatcaccgagaagatcctgaaggcctttctggtcaacgagaatgtggtgtccaagagcgacatcaacgccctgaaaattgacggctaccagaaggacaaagagttctccacctgtctgagcagctacgtcaacatcgtgaaggccctgggcaacgacttcgacagaggctatgtggacaacaatatcgacaccttcgagcggatcatcgagctgagcaccgtgtacgccgacaacaagtccctgttcgtggaaaagctgaaacaagagttccccgctctggacgagcgcgtgatcgctaaagtgaagggcctgaccttcacaaagtggggcagactgagcaagagactgctcgtgggcgttgtggcctctaataccgctacaggcgaggtgtccaacatcctgagcctgatgagaaacaccaacgccaacttcatggaaatcatcttcgacaaagagtggaacttcaacgccctcatcgaggaagagaacaagagcgtcagccggcagatcgataagatcaagtactccgatatcgccgagctgtactgcagccctagcgtgaagagagccatctggcagagcatcaagatcgtgcgcgagatcgtggaaattatgggctaccctcctaccaagttcttcgtggaagtgaccagaagcgacgaggataagaagagaaccagcagcagaaagagcgtgctgcagaaactgtacaaaggcgtggacgacagcggagacatcaaggccatcaaagaggccctcgagaaagagaatgagaacagcctgaaggacgagcggctgtacctgtactactctcagcagggcaagtgcatgtacaccggcaagcccatcaacatcgacgatctgctgaacaccaagctgtacgacatcgaccacatctaccctcagagcatgaccaccgacgagagcgtgcaccggaacaaggtgctcgtgtgtagaagcgccaacaaggacaagtccgacgtgtaccctctgaacatcgaggtgcagaacaagatggccggcttctggaagtccctgcgcgacaaagagtttatcacccctgagaagtacatccggctgacccggaaagagcccctgacagacaaagagctgggagactttatcgcccggcagctggtgtttaccagccagagcgtgaaagaagtgatcaacctgctgaagattgagtaccccaacagcgagacatgctatgtgaaggccgaggtggtcaaggactttcggagccggaacaactatctgaagatccggacactgaacgacctgcaccacgccaaggatgcctatctgaacgtggtggccggcaatatcctgagcacagccaacaaaaacaacttccggatgcagcggatcaacaagggcaacgagatcgataccgacatcattaagaattacagcatcagcaacatcttcagccggggctacgtggtgtctacagccaagaacctggcctggaattgcgacctgttcgacaacgtggaaaaacagtactaccggaacgacatcctggtcaccaagatgcagacagtcggcaagggcgccttctacgacgagacagttagaaagagcctggccaacgctaagtacgccaaggccgccagaaaagcctccattcctctgaaaaaagtggaaggcaaccggtactccatcgagagatacggcggagtgacaaccgtgtctccacgttggttcgccctgatcggctgctctgacaagaagaacaaccagatctacaggatcgagccgatcaccatctacgattacgccaagatggacaagagccgcatcaaggacgagatggcctctctgctcgagagacagggccacaagaatgtggatatcattgccatcctgaagaagaataccctgctgtccatcgacggaaatcggtactacctgacaggcaccagcggcgagagcctgacactggataatgccaagcagctgaccgtgggcagagaatacgagctggccgtgaaccggattctgaagtacacagagaaccccaagagaaacaaggacgtgaccgaggtggccatcagaagcaagagcaaagaggactacaacattgacgagaaggccgtgttcgtgatgctggtggacaaactgaaaaccgagtttccccagttcagagtggtggcctccaagttcgacgacgagtctatcaaggccttcgacaccgccagcaagtccagacagtgcgagattatcaccaatatcatcaacatgatgggctgcaacagcacccggggaaagctggatggcgagcccttcaatgccaatttcaaggcctctgagggcgctctgaccgctaacaaaaaggtgtcctacgagctgacagtgatcgaccagtctgtgaccggcgtgtacgagtactccaagagcattaagaagggatcc

SEQ ID NO: 248 - DNA, 4170 bp, Artificial Sequence
  OMNI nuclease sequence
ggtaccgaaaagaactactacatcggcctggacatcggcaccaattctgttggctgggccgtgaccgatgagaagtacagcgtggtcaagaagaaaggcaagcggctgtggggcgtcagactgtttgatacagccgccaccgccaagaagcggagactgaaaagaaccgccaggcggagatacctgcggcggagacaaagaatcgacctgctgcaagagctgttcgcccctctgatcctggaacgggacgagaacttcttcagacggctggatgagtcattcttctttgaagaggacaagaaggtggacggcaagtacagcctgttcagcgacaagaactacaccgacaaggacttctacaaagagtacaagaccgcctaccacctgagaaaccggctgatcaagggcgacatccccgacgatcctagaatcgtgtatctggcctgccaccacatcatcaagaagaggggccacttcctgttcaacggcgagatcaacggcaacaacatcagctgcgacaacgagatccggggcctgcagaaattcgtgaccgacggcaatgaccacgacgtgccaatgttcggcggcgacaacttcaaggatttcagcctggacgagttcgtgaagatcatcaccctgaccgacaccagaagagagagcatcgagaaaaccaccgagctgtttggcgtgtccgatggcaagtacctgaagaacgccgtcagagtgatgttcggctacaagcagaaagtgaaaaccctgttcgccagcgagtactacggcgactgcgatatcgagatcgacttcaccagcgagcagtacgaggaaaccagcgaggccctgaagatcgagctgggcgacgactacagctacgtggacaccctgaagaatctgtacgacttcgtggtgctgaagcggctgctccaagagcactctagcatctccgaggccatggtgtctaagtacgagagacacgccgtggaactgcggatgctgaagaacatcgtgcggaagtacggcaagacctccgactacaatgagattttcaaagaaaccgtgtccgacgccagctacgccaagtacatcggcatgaacaagaaaggcggcgtgaagcaagtgaccgagagagagagcgcctactcctacgagacattctacaaggccctgctgggcaagctggacagcatcgtgacagataagagcgacgccgactacctgtgcatcaagaaccggatcgagaacaaagacttcctgatcagatacgccagcagcgtgaacgccagcattcccaaccagctgcacagggacgagctgaacagaatcctggacaacgccagcgtgaagttcccctacctgctggaaaaagatggcgacggcctgagcgtgaaggacaagatcatgtctatcatgacctacaagatcccttactacgtgggccccattcctaacgacgagaatagcgaggccatcggcaagtatagctggcttgtgcggaaagaaagcggcaaggtgctgccctggaacttcgagaagaaagtggacatgaacgcctccatggaaaagttcatcaagagcctgatcaaccggtgcagctacctgaacaccgagaacgtgctgcccaagcagtccctgatctaccaagagtatgaggtgctgaatgagctgaacggcatcaagttcaatggcaagcggatcgacaatgagacaaagctcaagatcttcgaggggctgttcaagaactccggcaagaagaagatcaccgagaagatcctgaaggcctttctggtcaacgagaatgtggtgtccaagagcgacatcaacgccctgaaaattgacggctaccagaaggacaaagagttctccacctgtctgagcagctacgtcaacatcgtgaaggccctgggcaacgacttcgacagaggctatgtggacaacaatatcgacaccttcgagcggatcatcgagctgagcaccgtgtacgccgacaacaagtccctgttcgtggaaaagctgaagcaagagttccccgctctggacgagcgcgtgatcgctaaagtgaagggcctgaccttcacaaagtggggcagactgagcaagagactgctggaaggcgtggtggcctctaataccgctacaggcgaggtgtccaacatcctgagcctgatgagaaacaccaacgccaacttcatggaaatcatcttcgacaaagagtggaacttcaacgccctcatcgaggaagagaacaagagcgtcagccggcagatcgataagatcaagtactccgatatcgccgagctgtactgcagccctagcgtgaagagagccatctggcagagcatcaagatcgtgcgcgagatcgtggaaattatgggctaccctcctaccaagttcttcgtggaagtgaccagaagcgacgaggataagaagagaaccagcagcagaaagagcgtgctgcagaaactgtacaaaggcgtggacgacagcggagacatcaaggccatcaaagaggccctcgagaaagagaatgagaacagcctgaaggacgagcggctgtacctgtactactctcagcagggcaagtgcatgtacaccggcaagcccatcaacatcgacgatctgctgaacaccaagctgtacgacatcgaccacatctaccctcagagcatgaccaccgacgagagcgtgcaccggaacaaggtgctcgtgtgtagaagcgccaacaaggacaagtccgacgtgtaccctctgaacatcgaggtgcagaacaagatggccggcttctggaagtccctgcgcgacaaagagtttatcacccctgagaagtacatccggctgacccggaaagagcccctgacagacaaagagctgggagactttatcgcccggcagctggtgtttaccagccagtccgtgaaagaagtgatcaacctgctgaagattgagtaccccaacagcgagacatgctatgtgaaggccgaggtggtcaaggactttcggagccggaacaactatctgaagatccggacactgaacgacctgcaccacgccaaggatgcctatctgaacgtggtggctggcaatatcctgagcacagccaacaaaaacaacttccggatgcagcggatcaacaagggcaatgagatcgacacggacatcattaagaattacagcatcagcaacatcttcagccggggctacgtggtgtctacagccaagaacctggcctggaattgcgacctgttcgacaacgtggaaaaacagtactaccggaacgacatcctggtcaccaagatgcagacagtcggcaagggcgccttctacgacgagacagttagaaagagcctggccaacgctaagtacgccaaggccgccagaaaagcctccattcctctgaaaaaagtggaaggcaaccggtactccatcgagagatacggcggagtgacaaccgtgtctccacgttggttcgccctgatcggctgctctgacaagaagaacaaccagatctaccgcatcgagccgatcaatatctacgattacgccaagatggacaagagccgcatcaaggacgagatggcctctctgctcgagagacagggccacaagaatgtggatatcattgccatcctgaagaagaataccctgctgtccatcgacggaaatcggtactacctgacaggcaccagcggcgagagcctgacactggataatgccaagcagctgaccgtgggcagagaatacgagctggccgtgaaccggattctgaagtacacagagaaccccaagagaaacaaggacgtgaccgaggtggccatccgcagcaagagcaaagaggactacaacattgacgagaaggccgtgttcgtgatgctggtcgacaagctgaaaaccgagtttccccagttcagagtggtggccagcaagttcgacgatgagtccatcgaggccttcgacaccgcctccaagtctagacagtgcgagatcattaccaacattatcaagatgaccgggtgcaacagcacccggggaaaactggatggcgagcccttcaatgccaatttcaaggcctctgagggcgctctgaccgctaacaaaaaggtgtcctacgagctgacagtgatcgaccagagcgtgacaggcgtgtacgagtacagcaagtctatcaagaagggatcc

SEQ ID NO: 249 - DNA, 4170 bp, Artificial Sequence
  OMNI nuclease sequence
ggtaccgaaaagaactactacatcggcctggacatcggcaccaattctgttggctgggccgtgaccgatgagaagtacagcgtggtcaagaagaaaggcaagcggctgtggggcgtcagactgtttgatacagccgccaccgccaagaagcggagactgaaaagaaccgccaggcggagatacctgcggcggagacaaagaatcgacctgctgcaagagctgttcgcccctctgatcctggaacgggacgagaacttcttcagacggctggatgagtcattcttctttgaagaggacaagaaggtggacggcaagtacagcctgttcagcgacaagaactacaccgacaaggacttctacaaagagtacaagaccgcctaccacctgagaaaccggctgatgaagggcgacatccccgacgatcctagaatcgtgtatctggcctgccaccacatcatcaagaagaggggccacttcctgttcaacggcgagatcaacggcaacaacatcagctgcgtgaacgagatccggggcctgcagaaattcgtgaccgacggcaatgaccacgacgtgccaatgttcggcggcgacaacttcaaggatttcagcctggacgagttcgtgaagatcatcaccctgaccgacaccagaagagagagcatcgagaaaaccaccgagctgtttggcgtgtccgatggcaagtacctgaagaacgccgtcagagtgatgttcggctacaagcagaaagtgaaaaccctgttcgccagcgagtactacggcgactgcgacatcgagatcgacttcaccagcgagcagtacgaggaaaccagcgaggccctgaagatcgagctgggcgacgactacagctacgtggacaccctgaagaatctgtacgacttcgtggtgctgaagcggctgctgaaagagcacagcagcatctccgaggccatggtgtctaagtacgagagacacgccgtggaactgcggatgctgaagaacatcgtgcggaagtacggcaagacctccgactacaacgagattttcaaagaaaccgtgtccgacgccagctacgccaagtacatcggcatgaacaagaaaggcggcgtgaagcaagtgaccgagagagagagcgcctactcctacgagacattctacaaggccctgctgggcaagctggacagcatcgtgacagataagagcgacgccgactacctgtgcatcaagaaccggatcgagaacaaagacttcctgatcagatacgcctccagcgtgaacgccagcattcccaaccagctgcacagggacgagctgaacagaatcctggacaacgcctccgtgaagttcccctacctgctggaaaaagatggcgacggcctgagcgtgaaggacaagatcatgtctatcatgacctacaagatcccttactacgtgggccccattcctaacgacgagaatagcgaggccatcggcaagtatagctggcttgtgcggaaagaaagcggcaaggtgctgccctggaacttcgagaagaaagtggacatgaaggccagcatggaaaagttcatcaagagcctgatcaaccggtgcagctacctgaacaccgagaacgtgctgcccaagcagtccctgatctaccaagagtatgaggtgctgaatgagctgaacggcatcaagttcaatggcaagcggatcgacaacgagacaaagctgaagatctttgagggcctgttcaagaactccggcaagaagaagatcaccgagaagatcctgaaggcctttctggtcaacgagaatgtggtgtccaagagcgacatcaacgccctgaaaattgacggctaccagaaggacaaagagttctccacctgtctgagcagctacgtcaacatcgtgaaggccctgggcaacgacttcgacagaggctatgtggacaacaatatcgacaccttcgagcggatcatcgagctgagcaccgtgtacgccgacaacaagtccctgttcgtggaaaagctgaaacaagagttccccgctctggacgagcgcgtgatcgctaaagtgaagggcctgaccttcacaaagtggggcagactgagcaagagactgctcgtgggcgttgtggcctctaataccgctacaggcgaggtgtccaacatcctgagcctgatgagaaacaccaacgccaacttcatggaaatcatcttcgacaaagagtggaacttcaacgccctcatcgaggaagagaacaagagcgtcagccggcagatcgataagatcaagtactccgatatcgccgagctgtactgcagccctagcgtgaagagagccatctggcagagcatcaagatcgtgcgcgagatcgtggaaattatgggctaccctcctaccaagttcttcgtggaagtgaccagaagcgacgaggataagaagagaaccagcagcagaaagagcgtgctgcagaaactgtacaaaggcgtggacgacagcggagacatcaaggccatcaaagaggccctcgagaaagagaatgagaacagcctgaaggacgagcggctgtacctgtactactctcagcagggcaagtgcatgtacaccggcaagcccatcaacatcgacgatctgctgaacaccaagctgtacgacatcgaccacatctaccctcagagcatgaccaccgacgagagcgtgcaccggaacaaggtgctcgtgtgtagaagcgccaacaaggacaagtccgacgtgtaccctctgaacatcgaggtgcagaacaagatggccggcttctggaagtccctgcgcgacaaagagtttatcacccctgagaagtacatccggctgacccggaaagagcccctgacagacaaagagctgggagactttatcgcccggcagctggtgtttaccagccagagcgtgaaagaagtgatcaacctgctgaagattgagtaccccaacagcgagacatgctatgtgaaggccgaggtggtcaaggactttcggagccggaacaactatctgaagatccggacactgaacgacctgcaccacgccaaggatgcctatctgaacgtggtggccggcaatatcctgagcacagccaacaaaaacaacttccggatgcagcggatcaacaagggcaacgagaacgacaccgatatcatcaaaaactacagcatcagcaacatcttcagccggggctacgtggtgtctacagccaagaacctggcctggaattgcgacctgttcgacaacgtggaaaaacagtactaccggaacgacatcctggtcaccaagatgcagacagtcggcaagggcgccttctacgacgagacagttagaaagagcctggccaacgctaagtacgccaaggccgccagaaaagcctccattcctctgaaaaaagtggaaggcaaccggtactccatcgagagatacggcggagtgacaaccgtgtctccacgttggttcgccctgatcggctgctctgacaagaagaacaaccagatctacaggatcgagccgatcaccatctacgattacgccaagatggacaagagccgcatcaaggacgagatggcctctctgctcgagagacagggccacaagaatgtggatatcattgccatcctgaagaagaataccctgctgtccatcgacggaaatcggtactacctgacaggcaccagcggcgagagcctgacactggataatgccaagcagctgaccgtgggcagagaatacgagctggccgtgaaccggattctgaagtacacagagaaccccaagagaaacaaggacgtgaccgaggtggccatcagaagcaagagcaaagaggactacaacattgacgagaaggccgtgttcgtgatgctggtggacaaactgaaaaccgagtttccccagttcagagtggtggcctccaagttcgacgacgagtctatcaaggccttcgacaccgccagcaagtccagacagtgcgagatcattaccaacatcattaacatgatgggctgcaacagcacccggggaaagctggatggcgagcccttcaatgccaatttcaaggcctctgagggcgctctgaccgctaacaaaaaggtgtcctacgagctgacagtgatcgaccagtctgtgaccggcgtgtacgagtactccaagagcattaagaagggatcc

SEQ ID NO: 250 - DNA, 4143 bp, Artificial Sequence
  OMNI nuclease sequence
ggtaccgacaacaagaagatctttctgggcctcgacatcggcaccaattctgttggatgggccgtgaccgacgacgagtaccggctgagaaagttcaagaacgacctgatgtggggcgtgcacctgtttgatgaagcccagcagtctgccgacagacgggcctttagaacagccagaagaaggctggaccggcggaagcagagaattgccctgctgcaagagttcttcgcccctgagatcatcaagaaggaccccaccttcttcatccggctgaaagagtctgcactgctgccccaggacagagagcacagaaacagcagcatcttcttcaacgacgacaactacaccgacaaagagtacttctctcagttccccaccatccaccacctgatcaccgagctgatgaagaacgacaaccctcacgacgtgcggctggtgtacctggcctgttcttacattctggcccaccggggccactttctgttcgaggtggaaaaggacgacatcgagtctatcaagaagttcgcccctatctacgccgagttcatcgacaccctgaacaatatctgcgacagcatccccttcgacgacaatatcagcgagctggaagagatcctgcggctgagatgcaccgtgtccgagaaagagaagcggctgacagccctttggttcgccggaaagaagccctccagagatctgtgcgagggcctgagattcgacctgctgattaagctgctgagcggcggcaagaccaaactggaagaactgttcatcaacgatgagtacaaggacctggaagtgtccagcgtgtgtgccgcctctgccgattttggcgatatcctggattctctggccggcgtggtcacccctgaacagttttctctgctgtctgccgtgaagaagctgaacgactggtccctgctggtcaacatcctgaagaacagcgactccatcagccacagcaagatcaaagagtatgaggcccacaagaaagacctcgagatgctgaagggcatctgccggaagtacctgaacaagaccgagtacaactccatcttccgcgacaaagaagagaagaacaagtcctacaacagctacatcaacagccccaagaactgcagccaagaggacttctgcaagttcgtgcggaccttcatcgataagatcaagtgcgaggaaaacgacaagcagaccctggaatacctgaagcagaagtgcgccgacaagacactgtgccccaagcaagtgaataccaacaacagagtgatcccctaccagctgtactaccacgagctgaagtgcatcctggacaacgcctgcatctacctggactttctgaacgagcgggataagtacggcaccgtggccgacaaaatcctgtctatcatggaatttcgcatcccgtactacgtgggccctctcgtgaaccacagcgacaatcccaacgcctggatgatcagaaagagcgagggcatcatcaggccctggaacttcgacgagatggtggacctggataagtccgaggttgagttcatcaagcggatgacctgcagatgcacctacctggctggcgaggatgtgctggccaagaatagcctgctgtactgcaagtacaccgtgctgaacgagatcaacaacatcaccgtggacggcaagaaaatcagcgtggccgccaagcagaagatctacaacgagcagttcatgaagaaacggcgcgtgaccgtgaagatgatcggcaatctgctgcactcctgtggcgagatgacaagcgagcagaagctcggcggcatcgacctgacaatcagaagcagcctgaagtcctaccacgacttcaagagcatgctggaacggaaggtgctgtgcgagagcgacgtggaaaagatcatcgagcggatcaccgtgaccaccgacatcaccagactgaagtcttggctgaagcaagagtaccccagcatcagcgccgaggacgtgaagtacatcagcaagctgaactacaaggactacggccggctgagcagacggctgctggaaaacgtgtacgagacagacaccaacaccggcgaggtggtcaacgagggcaatatcatcacccggctgtgggagacaaacgacaatctgatgcagctgctctccagcaagtacaagtacatggaacggatcaaggccctcaacaaagaatattacagcgaccccaagcacagcctgaccatcagcgacagactgaaagagatgtacgtcccaaccgccgtgcggcggagcatcaatagaaccctggacgtggtcaatgagatcaagtctatcgccggcaaggaccccgacaagatctttatcgagatggcccgcgagaacgacatgaccaagaaaggcgtgcgcaccaagagcagaagagagcagatcaagaccctgtttgaggacgccaagaaactgagcgacatgagcgccgagattgcccacctggaagaaaagctgagcgagactgacgacggcaagctgcggagcgagaagtattacctgtactttacacagctcggccggtgcatgtacaccggccatcctatcgatttcgagaaactcggcggagacacctactacaacatcgaccacatcttcccacaagccaagatcaaggacgactccctggaaaacaaggtgctggtggaaagcgaggccaacggcaccaagtccgacacataccccatcgacaaggacatccgggacaagatgagaggcttctggaagtccctgcacgagaaaaagctgatcggcgacaagaagctgcagagactgatccgcagcaccccttttagcgaggatgaactggccggcttcatctccagacagctggtcgagacaaggcagtctacaaaggccgctgccgaactgctgaaagaactgtgtcctgagagcgagatcgtgtacgtgaaggccgaactggccagcgacttcagacacgaaaccgacatgctgaagtgtcgcgagattaacgacctgcaccacgccaaggacgcctacctgaatatcgtgatgggcaacgtgtacaacgccaagttcacaaaggaccctctgaacttcatcagaagcggcgagcactactccctgaagatgttcaagaagaacgccgacggaaagaccagcggcctgctgacacacaaggtggaaagaaatggcaccaccgtgtgggaccctgccaagagctttgacaccgtgcgcaagatgatgagcaagaactccgtcagatacgtgcggtacacctacaagcggaaaggcggcctgttcaaccagatgcctgagagcaagaagcccggcctgatccagagaaagaagggcctgaaaaccgagaagtacggcggctacaacaacgccagcgtgtccaccttcggaatcatcaagtgcaagaatgacatcgtgatcatccccatcgagatcatgaaggagtacaagttcttcagcgacaacatctttgccaagcagtacgccctcgagaagctcgagaacatctaccctcagaagaagtaccagagcctgacctgcgaggatatcatcgtgccctgcatccactaccaggacggcagcaagagactgcccattctgaagattaacagcctgctggaagtgaacggcttccggatcaacctgtgcagcaaggacagcggcggaaagtacatgattgtgtctggcgccgagagcctgatctgtagctaccaggatgagaagtatatcaagagcgtgtgcagctacgccgccaagaccatcgatgagaaaagcctgcagtacaacggcatcagctacgagcggaacctggacatctacgatctgatctgccagaagtgtgccaacggccacttctccaagtggaagaagttccgggacaccagcatcgtcctgaacaaaaagcgggacatctttatcagcctgagcctgaacgaacagatctgcgccctgaaagaaatcgtgaacatcctcaagagcggcagaagcgtgtactgcgacctgtctgccatcgaggaaagcaagcagagctgcatctctaagctgggcgccgtgctgaccagcatcaagtccgtgtctgacatccggatcatcgatcagagccctaccggcctgtacgaaaagaaaagcgtgaacctgctcgagctgggatcc

SEQ ID NO: 251 - DNA, 4290 bp, Artificial Sequence
  OMNI nuclease sequence
ggtaccgtgaagaagtacctgctgggcctcgatctgggcaccaattctgttggatggtgcgtgaccgacgagaacaacaagatcgtgaagaaaggcggcaagagcctgtggggcgccagactgtttgaagaggcccaggatgcttccagcagaagggccaatcggatcgccagaagaagaacacagcggagagccgagagaatcgacctgctgcagatgctgttcaaagaggaaatcgacaagatcgacagcaccttctttctgcggctgaaccagagcatgtaccacaaagaggacaaggacgacagcatcagcaacttcgacaacctgctgttcgtggacgactccttcaacgacttccactactacaagaagttccccaccatctaccacctccgcaagtacctgtacgacaccaacgagaaggccgacatcagactgctgtatctggccctggctcacatggtcaagtaccggggcaatttcctgatcgagggcgagttcaaggccaacgatagcggccagatcaccctgctgtttaagaacctgaagtccgtgctgctggaactgcccgatgagaacagctgcagcatcgagctgaaagagaacttcgccgacgagtttaacgccaaggtgctgaaggctaagggcgtgtccgccaagaaagaggccctggaaaccatgttcggcaaggacaagtatctgaagatcgtcatcttcccactgatcgccggcagcgaagtggacaccgccaagatctttagcgactacgagggcgacatcgaccccgataagatcagcttctccaaggccgactacgacgataagtacgccaagctgagcgagttcttccccaacgacctgcggatcgagatgatcagcatcctgaagggcatctacgactacgtgctgctcggcaagctgctgggcgataagtctacaatcagcgaggccatgatcgagagatacgacacccacaaggccgatctgaagaagctgaaggcctacattaaggccaacattcccgagaagtacaacgaggtgttcagactgcacggcggcgacaaagaaatcaacaactacgtgaactacgtcggcagcaccaacagcaacctgggcaagctgagatgcaagcactgcgaccaggacggcttctacaagtacatcaagaagatcctgaagattgacgataccaagttcgaggaaatccaggacgacttcctgaaggatatctacaccaagatcgccgacaagagctacctgcctagacagaactctaccgacaacggcgtgttcccctaccagctgaacctgaccgagatgaagaagattctcgagatccagaagtcttactacccgttcctggaaaagaaggacgacgacggcatctccaccatcgagaagattgagagcctgctgaccttcaagatcccctactacgtgggccctctgatgcccgtgatcgacggcaatcctagaagcagccacagctggatggtccgaaaggacgataagaccaagatctacccctggaacttcaagcagatcgtggatgaggaccagagcgccgagaagttcatcaagcggatgctgaacaagtgcacctatctgcccgactgctactgcctgcctctgaactctctgctgttccagcggtacagagtgctggaagtcctgaacaaactgctgatcaacggcatgcccctgaccaaggtcctcaaagaagaactcatcaacgaagtgtttaaaaagaacaagaccgtgaccaagaagaagatcgaggactacctgaccaacaaatacgagaagcccaacagcatcaccaccagcaacgagaaagaagtgaagcagattgacgccagcctgagcagctacgtgttcttcagcaacgtgctgggagaagagtacgtgaagaacaacgagtctcagatcgagcagatcatcaaggacctgaccatcttcgaggataagaagatcatcgagaggcggctgagcaagtaccacttcaccgagaagcagatcaacgagatcaagagcaagaagatgaccggctggggccgactgagcaaagaatttctgaccatgaccaccaggctgtttaacgaggccaccggcgagtacatcgacaagtccctgatcgaagtgatgaatgacaccaacttcaacctgatggaactgattaacgacacgaactacgacttcaagcggaagatcgaagaggccaatttcaaggacagagtgacctacaaggatcacaaagagaagcacgaggccatcgtgaaatacgtggacgagtgttacgtgtcccctggcatgaagcggcctctgatccaggccatgagcatcatcgaggacgtggaaaagatcctgggcagccccatcgacgagtactatgtggaatgcacccggaccaacaaggctgagaagaaagtgaaggacagccggcagaagcacctccaagagctgtatgagcaggccaagaagctggccaaagccgagattaagaacagcgccgacaaagagagagtcctgagcgagatcgactacttctccaacaaagtgaagaacgagaacgagctgtccaagtttcggagcgacaagtactacctgtacctgctccagctgggcaagtgcatgtacaccctgaagcctatcagcctggccgatatcaacgacaactctaagtacgacgtggaccacatcatccctcaggccatgctgaaggatgatagcatcgagaaccgggtgctcgtgtgctccgaggccaaccggtacaagaaggccatctatcccgtcagcgaggaactgatctctcctggcgccaaggccttttacaagaacctgtacaagctgggcctgatgggcgagaagaagtataacaacctgatccggaccaagcctctgagcgacagcgatctgatcggcttcgtgaaccggcagctggtgtacacaaatcaggccgtgaaggccctggtggacaccatcaagagattccaagtgaacaaggacggcaacccgcctaaagtgatctacagcaagggcgagaacgtgtccgacttcagaaaggacttcgacatcgtgaagtgccgggacgccaatagcttccatcacgcccacgacgcctacctgaatatctgtgtgggcagagccatcaacacctactacggcgacttcaattacttcaagtaccaagagttcaaagaaaacaagcgcagcttcaaccccaagaagattttctgcaacaacgagcgcgacggcagcaagtctcctctgctggattctgacggcaacgtcgtgtgggactacaagaccagcatctccgagatcaaaaagaatatcttcacccgcttcgacgtgctgaccaccaccatgcagtatatcaaaggcggccagctgaccaacgccaccatcaatcctaagggcgacaatctggtgcctgtgaaagaaaacggccctctgtccaacaccaagaagtacggcggaaagtccggcgtgacctactccatctactccctggtcgagttcatcgacggaaagaagaaaaagcggctgatcgcccctattcctctgagccagatcaagggaaagtacctcaccgacaacatcatcgactacctcagctccaaatacggctataaggatatcaaggtgctcatcccctgcctgagaatcaacagcgtgctgagaaacaagagcagcagagtgtgcctgagcggcgtgtgcgacgaaatgaagtcctactatgtgaagaacctctctgagatccactacagcgagacagagctgcggacaatcaagaaaatccgcaagatgctggacatcatcagccggaagaaactcgacatgtccaaagaggatttcattgagaaggtgtccaagctgatgattttcagcaccgactccatcatcatctccccagccgccaacgagagaacaaaggccgtggtgctgacaaatggccagctggacgatctgtacaacaagttcgtcaccatgaacaagaagcacatcagcctgttcaagtccagcttcgccatcatcgatctgctgaccaaagaagagactaaggccaagttcaacttcctcaatatcttcgagaagtccaagatcgttatggaactggtgctgtacttcaacagcagcatccagggcgccaacctgtctctgatcggaggaccttctaaggccggcaaggccagaatcagcagcaacatccccagcggcatcgacatcattgccgagtctcccaccggctttttcaccaagacactgtggaaggccagcggatcc

SEQ ID NO: 252 - DNA, 4128 bp, Artificial Sequence
  OMNI nuclease sequence
ggtaccagaggtgccctgctgatgggcaagaactacatcggcatcgacatcggcaccaacagcgtgggaattgcccagaccgacgagaactaccgggtgctgaagttcagaggcaacgccatgtggaccagcgccgtgtttgaatctgccgctcagtctgccgagtgcagaggctttagagtggccagaagaaggctggacagacggcagcagagaagggatctgctgattgaactgatggcccctgccatcgtggacatcgaccccgtgttcttcaagcggatcagagaatctgccctgtgggccgatgataagaccaccggctccagatacacctacttcagcgacgagggctacaccgacaagcagttccacagagactaccccaccatccaccacctgatctgcgagctgatgaacgaccccagtcctcacgaccctagactggtgtttatcgcctgcagctacatcctgacacaccggggccactttctgaacgacgccgacaaagaaaagatcagcgacgtgctggatatcggcaaggtgttcaagggcttctccgactggttccgggacaacgactctgcctttccattcggcgatagcgccgacgagttcggcagaatcctgatcaacgagaagtccatccggaacagacccggcgtgttctactctgtgtacttcggcggcaagaagcccaagccagccatcgacgacgtgatcgacgtgaacgagctgatcaagctggtgtctggcggcgtgatcgagctgtccaaactgttcatgaatgaggaataccaagagctggaaaacaacaagatccggctgagcgacgccgcctttgatgagaaagccacaggcctgagagaaggcctgggagatgattttggactgatcgccgctgccaagaacatctacgattggagcctgctgaccggcgtgctgggaaattctggaagcctgtctgaagccaaagtgcgggtgtacgagaagcacggatctgatctggccgctctgagaagagtcgtgcggcactactgccccgaccagtacaagagcatcttcaagacctgcgagaagggcaactacaccagctacagcggcaacgtgaagtccgtgaaggacatcaccaagttcgagcggtgcaatcaagaagagttctgcgaccacctgaagtccctgctgaaaagcgtgaagcctgagcctggcgattccgagtgcgagagagtgctgaaagagatcgccgagcacacactgtgccccagacaagtgaacagcgacaacagagtgatcccctaccagctgtactacaccgagctgaagaagatcctggaaaacgccgccaactacatccctcagctgaacgccacagacgagtacggctctatcgccagcaagatcctgagactgatgaccttcagagtgccctactacgtgggccctctggtcaagaagaaagagaagaacaacgcctggatcgtgcggagaggcgagggaagaatcctgccttggaacttcgacgacctggtggacagagacagatgcgaggacgagttcatcaagagaatgacctgcaagtgtacctacgtggccggcgaggacgtgctgcctaagaatagcctgctgtactccaagttcatggtcctgaacgagatcaacaacatccggatcgacggcaagagagagaacttccctgtcgaggccaagcagaaggtgtacactgagctgttcgagaagcggaagagggtgtccgtgcgggacatcaaaaatctgctggtgtccgagggctatatgaagcccgagtctcagatcgaaggactcgacatcaccgtgaagtctagcctgaagtcttggaacggcttcaagaagctgctggcctctggaatgctgtccgaggccgaggtggaagagatcatcgagaggatggcctgcaccaccgacatctccagattcagagcctggctggaaaagttcggcctgacagccgccgacatcagatatatcagcggcctgaagtacgccgacttcggcaggctgtctagaaccttcctgacagagatccccgacatcgatcccaccacaggcgaggaactgcaccccaacatcatcaccatgatgtgggagacaaacaacaacctgatggaactcctgagcaagaattacaactacagcagccagatcgagagcatgaatcaagagtactactctcagcaccctctgaagctggacgagagactgtccgagatgcacatccctagcgccgttagaaggccagtgaagcgcgccgtggaaatggtccgagagtatagcagagccgtgcacaaggcccctgaccggatctttatcgagatgagcagggacctgaccgatcctcagaccaagggcaagagaacccagagcagacgggacttcatcctcgagtactataacaagctgaacgaggacaccaccgctctgcgggccctgctcgaaaacaaatctgatggcgacctgcggagcgagaagctgtacctgtacttcatccagctgggcagatgcatgtactccggccagagcattgatatcgagcagctggccggggaaacctacaacgtggaccacatcttcccacggtgcatggtcaaggacgacagcatcgagaacaaggtgctggtgctgagcaccctgaatgccgccaagggcgacaattatcctatcgctcccggcatccagagggacagatatggcctgtggaagaagctgaaggatatcggactgatgggcgagacaaagtaccggcggctgaccagaaccacaccattctccgatgatgaactggccggcttcatcagcagacagatggtggaaaccagacagagcacaaaggccgtggctgccctgctcaaagaggaatttcctgagagcgagatcgtgtacgtgaaggccggactggccagcgagttcagagatcagtatggcctgcctaagtgccgggaactgaatgatctgcaccacgccaaggacgcctacctgaacatcgtgatgggaaacatctaccacgtgaagttcaccagcaatccgctgaacttcgtgaaagagttccggtccaagaaagaagtgttcaacctgaagctcgagacaatgctgagccacgatgtgatcagaaacggcgaaaccgcctggattggagatggctcttggctggaagccgtgaaaaagcagatgaacaagaacaatatccgctacgtgcggtactccttcagacggaagggacagctgtttgcccagcagccactgaagaaaggctgtggccaggtgccacggaagaaggacctgcctattgagagatacggcggctacaacggcaccaccgccagcttttttagcctggtcaagtaccacagcgagaaaaccagcggcgtggtcatcatccccgtggaactgatgtacagccagagattcgagcacgacaccgccttcgccgaggaatacgctgtgaaaatgctggggaatatcgtgtctctgaagtccggcgactccatcaagagcgtggactttccactgggctcccgcatcctgaaagtgaacaccctgctggaaatcgacggattcagagtgaacctgaccaacaaggccacaggcggcagacagctgggaatcacatctgctatgcccctgctggccgacaaccacgacaccatctacatcaagcgcatccacacaatctacggccggatcatggaatgcgagaaaaacaagagcacctacaatgtgcggccccagtacgacatgatcaccagagagcggaacatcgagatctacgacatgctgtcccagaaagcctgcatcacccctttcaacgtgatcttcagctacgcctccaagatcttctgcgacggcagagacacattcgtcgagctgggcgtgaacgaccagattaaggtgctcgtgaacatgatcagcgtgttcatgaccggccgcagcagcacctgtgacttcgagaagatcaacggcaaaaagcggagcctggaaatgcggctgaacagcaacctgagcaacgccaagggatacaagtccatcagaatcatcgaccagagcgccgctggcctgtacgaaaaggcttctcctaatctgctgaccctgggatcc

SEQ ID NO: 253 - DNA, 4062 bp, Artificial Sequence
  OMNI nuclease sequence
ggtaccgagaagttctacctgggcctcgatatcggcaccgagtctgtgggaatcgcctgcaccgacgagaactacagactgctgagagccaagagaagggatctgtgggccgtgcggctgtttgatgaagcccagcctgccgtgaacagacggacaaaaagagctgccaggcggagactgatgcggagagagagaagaatcgacctgctgcaagagatcttcgccccttatatcggcgacgataccttcttcctgcggctgaacaatagccctctgtggctggaagataaggacgagaagctgagcggcaagtactgcctgttcgccgacaagaattacaccgacaaggacttccaccgcgagtaccagaccatctaccatctgcggaaagagctgtgcgacggcaagaaaaaggtggacatccggctgttttacctggccatccaccacatcatcaagtaccggggccacttcctgtacgatggctctctggccgagatccggaacatcagcaagctgtttgccgagctgaacgacgcctgcgaggaagtttttggcgacgacgcccctagcttcgacatcgagaaggccgaagagttcaagaagaaggccaccgagaagaagggcctgaacgacaagtgcaaagagatcattgccctgttcggcgtgaaggacgacctgagcaagaatatcattaagtacatcgtgggcagcaaggtggcccctaaggccgtgtttggagagcagtacgccgatgagaagtccttcagcttcaaagaggtgtccgacgaggaatttgagggcaagagagaaggcttcggggacgacttcgtgctgctggaaaagatgcgcgagatctacaacttcgtggccttcgagaaggtgctgaacggcaaagagtgcatcagcgaggccatgatcgacatctacgagaagcaccggaaggacctgaagatcctcaagtacttcatcaagaacgagtacggcgacgaggcctacagaaccctgttcaaggatgtggacaagggcaacaactacgccaactacatcggcatggccaaagtgaacggaaagaaggtgtacgtcaagaagtgcgttaagtacgacgacttcaaggccttcctgaagaagctgctggccaccaagcctaagagcgagatcgtggacgactacacctacgactacgtgatgaaggaactggaagaggaccggttcctgcctaagatcctgaacagcgacaacggactgttccccaaccagatcaacctggccgagctggacaagatcctggccaacctgaagaaattctaccccgagacagccgagatcacagagaagatccggtctatcttcaccttccggattccttactacgtgggccctctgaacacctaccactccgacaaaggcggcaatagctggatggtccgaaaagaggatggcaccatcctgccttggaactttgccgacaaagtgaatctggccgccagcaacgagaacttcatgcggagaatgaccaacaagtgcacctacctgagcggcgaggacgtgctgcctaagttcagcatcctgtaccagaagtacaacgtcctgaatcagatcaacaagctgaagatcaacgagatccctctgaccgtggaacagaagcagggactgttcaacgataagtacctggtggacgccaagatgagcgacagaaagatcaaggactacttcgtcgagaaaggctggctgaccgccgaagaggccaagtctgccgtgatttctggcaaggatggcgagctgaccgtgtccatgagcagctacatcagactgaagaaaatcctgggagagctggtggatgagaacctgcggatgtgcgaggacatcatcctgtggcacaccctgaacaccgataagagcatcgtgaagtccctgatcctgaccaaatacggcgatatccccgccgtgcggaacaacatcggtagactgaatggcctgaccggcctgaaggatttcggccggtttagcgagaagtttctgaccggcatcaacggcggagaggaccctgtgacaggcgaaatctacacaatcctgagcgtgctgtacgacaccaacatgaacctgaacgagatcatcaacgacgacaaatacgggtttaagtacgccatcaaagagcacaacctgggcatcaatcagaccatcgaggacgagatcgaggaactgtatgtgtccccagccgtgaagagaggcatctcccaggccatgaagatggtggacgagtacgtgtccgctatcggcagagcccctgacaagatcttcgtggaagtgaccagagccgacggcacaaaaggcgacgccggaagatctgtgaagagaaaggacaacctgctgaagctctacgacagcgtgaagaaagagggcatcgagggctacgaagaactgctcaaagagctgaaagagaacgagacagacctgagcctgcggagcgagaggctgtacctgtactatatgcagctgggcagatgcgcctacagcggcgaacctattgatctggcctatctgcccggcgatacctacgacgtggaccacattctgcccagaagctacaccaaggacgacagcctggacaacaaggtgctggtcaagcgggacaagaatgccatcaagggcgacaagtaccccattccttacacactcgtgaccgataaggcccggaagctgtggaaagtctggaaagaaaagggactcatcagcgacaagaagtataagctgctgacccggacagagcctctgggcgccgacgattacaacgatttcatcaaccggcagaaggtgttcaccgaccagacaacaatcgccgtggccaagattctggaagccaggtttaaggccagcggcaccaagatcgtgtacagcaaggccaagaacgtgtccgatttcaagagcaagttcaacattgtgaagtgccgcgagacaaacgacctgcaccacgccagagatgcctacctgaacatcgtcgtgggcaacgtgtacgataccagattcggcaacgtgcgggcctacttctaccggaacgaggatgagaatagcttccgcgagatcaatctgaagtacatgttcaccaccgacacacccaacgcctggaaaaccggcgaaaccgcctacaccgtgatcgagacactggccaagcctagcatggccatcaccagatactcctacaccaacaagggccagttctacgacgaaaccctgcagaagaaaggcgccaattgcagcgcccctctgaaaggcaagggacccctgagcaatactgagaagtacggcggctacacaggcctgaccacagcctattttgtggtggccgagtccgatggcaaaaagggcgccagaatgaagacaatcgaggctatccccgtgtacaaagagtacggcatcaagtccgacgaagtgaagattaaggattacctcgagaacgagtgcgggctgaagaacgtgaaactgctggtgcccaaactcaagatcaagaccctggtcaagattaacggcttcaatgcctggctggccggcatgttcaacaattacgtgatcgtgcacaacgccaacgagtggttcacagacaaggacaccgatgattacgtgaacggcctgggcaagctgattgagacagccaagaatggcagcgtggacgagaacgaagaggaatacgtgatcaagacgaaccggaagaaagaagtgaagcaagtcatcaacgccgagaacaacattcggctgtacgataagatcgtcgagcagaccagcaagaagatctacgagggcatctccggcgccaagatcatcgtcaagacaatcaaagaaggccgggacaagttcgtgtccaagtccgtgctgaagcaggccagaatcctgctgcagatgatcaagtatctgaagtgcaacgccgaactggccaatatcgccgagatcggcggaagcgccaatagcggcaagctgtacactaacaaggacatcaccaacaccaacttcgagattgtgcacgtgtccccatgcggcctgaaaaccatcgtggtcaaagtgggatcc

SEQ ID NO: 254 - DNA, 4062 bp, Artificial Sequence
  OMNI nuclease sequence
ggtaccgagaagttctacctgggcctcgacatcggcaccgattctgtgggaatcgcctgcaccgacgagaactacagactgctgagagccaggcggagagatctgtgggccgtcagactgtttgatgaagcccagcctgccgtgaacagacggacaaaaagagctgctcggcggagactgatgcggagagagagaagaatcgacctgctgcaagagatcttcgccccttatatcggcgacgataccttcttcctgcggctgaacaatagccctctgtggctggaagataaggacgagaagctgagcggcaagtactgcctgttcgccgacaagaattacaccgacaaggacttccaccgggactaccccaccatctaccatctgcggaaagagctgtgcgacggcaagaaaaaggtggacatccggctgttttacctggccatccaccacatcatcaagtaccggggccacttcctgtacgatggctctctggccgagatccggaacatcagcaagctgtttgccgagctgaacgacgcctgcgaggaagtgtttacagaggacgcccctagcttcgacatcgagaaggccgaagagttcaagaagatcgccaccgccaagaagggcctgaacgacaagtgcaaagagatcattgccctgttcggcgtgaaggacgacctgagcaagaatatcattaagtacctcgtgggcagcaaggtggcccctaaagccgtgtttggcgagagatacgccgatgagaagtccttcagcttcaaagaggtgtccgacgaggaatttgagggcaagagagaggtgttcggggacgacttcgtgctgctggaaaagatgcgcgagatctacaactttatcgccttcgagaaggtgctgaacggcaaagagtgcatcagcgaggccatgatcgacgtgtacaacaagcacaagaaggacctcaagctgctcaagtacttcatcaagaacgagtacggcgacgaggcctaccggaccatgttcaaggacgtggacaaagtgaacaactacgccaactacatcggcatggccaaagtcaacggcaaaaaggtgtacgtgaagaagtgcgttaagtacgacgacttcaaggccttcctgaagaagctgctggccaccaagcctaagagcgagatcgtggacgactacacctacgactacatcatgaaggaactcgaggacgaccggttcctgcctaagatcctgaacagcgacaacggactgttccccaaccagatcaacctggccgagctggacaagatcctggccaacctgaagaaattctaccccgagacagccgagatcaccgagaaagtgcggtctatcttcaccttccggattccttactacgtgggccctctgaacacctaccactccgacaaaggcggcaatagctggatggtccgaaaagaggatggcaccatcctgccttggaacttcaccgacaaagtcaatctggccgccagcaacgagaacttcatgcggagaatgaccaacaagtgcacctacctgagcggcgaggacgtgctgcctaagttcagcatcctgtaccagaagtacaacgtcctgaatcagatcaacaagctgaagatcaacgagatccctctgaccgtggaacagaagcagggcctgttcaacgacaaatacctggtggaccccaagatgagcgaccgcaagatcaaggactacttcgtggaaaaaggctggctgaccgccgaagaggccaagtctgccgtgatttctggcaaggacggcgagctgaatgtgtccatgagcagctacatcaggctgaagaaaatcctgggagagctggtggacgagaacctgcggatgtgcgaggatatcatcctgtggcacaccctgaacaccgataagagcatcgtgaagtccctgatcctgaccaaatacggcgatatccccgccgtgcggaacaatatcgccgctctgaatggcatgaccggcctgaaggatttcggcaagttcagcgagaagtttctgaccggcatcaacggcggagaagatccagtgaccggcgaaatctacacaatcctgagcgtgctgtacgacaccaacatgaacctgaacgagatcatcaacgacgaccgctacggctttaaagaggccatcaaagagcacaacctgggcatcaaccagaccatcgaggatgagatcgaggaactgtacgtgtccccagccgtgaagagaggcatctcccaggccatgaagatggtggatgagtatgtgtccgccatcggcagagcccctgacaagatctttgtggaagtgtccagagaggacggcacaaagggcgacgctggcagatctgtgaagagaaaggacaacctgctgaagctgtacgagagcgtgaagaaagagggcatcgagggctacgaagaactgctcaaagagctgaaagagaaagagactgacctgagcctgcggagcgagcggctgtacctgtattatatgcagctgggcagatgcgcctacagcggcgaacctattgatctggcctatctgcccggcgatacctacgacgtggaccacattctgcccagaagctacaccaaggacgacagcctggacaacaaggtgctggtcaagcgggacaagaacgccatcaagggcgacaagtaccccattccttacgcactcgtgaccgataaggcccggaagctgtggaaagtctggaaagagaaggggctcatcagcgacaagaagtataagctgctgacccggacagagcctctgggcgccgacgattacaacgatttcatcaaccggcagaaggtgttcaccgaccagacaacaatcgccgtggccaagattctggaagcccggtttaaagagtccggcaccaagatcgtgtactccaaggccaagaacgtgtccgatttcaagagcgacttcaacattgtgaagtgccgcgagacaaacgacctgcaccacgccagagatgcctacctgaacatcgtcgtgggcaacgtgtacgataccagattcggcaacgtgcgggcctacttctaccggaacgagaacgacaactccttccgcgagaacaacctcaagtacatgttcaccaccgacacacccaacgcctggaaaacaggcgaaaccgcctacaccgtgaaagagacactggccaagcctagcatggccgtgaccagatactcctacaccaacaagggccagttctacgacgagacagtgcagaagaagggcgccaattgctctgcccctctgaaaggcaagggcccactgagcaatactgagaagtacggcggctacacaggcctgaccacagcctattttgtggtggccgagtccgatggcaagaaaggcgccagaatgaagacaatcgaggctatccccgtgtacaaagagtacggcattaagagcgacgaagtgaagattaaggattacctcgagaacgagtgtggcctgaagaacgtgaaactgctggtgcccaaactgaaaatcaagaccctcgtgcggatcaacggcttcaatgcctggattgccggcatgacaggcaagcagatcctgatgcacaacgccaacgagtggttcacagacaaggacaccgatgactacgtgaacggcctgggcaaactgaacgaggccgccaaaaatggctccgtggatgagaactgggaagagtacgtgatcaagacgaaccggaagaaagaaatcaagcaagtgatcaacgccgaaaacaacatctgcctctacgacaagatcatcgagcagacctctaagaagatctacgccggcatctccggcgccagctactacagagatagcctgatcaagtgccgggacgagtttgccaagaagtccacactgacccaggccaagacactgctgcagacaatcaagttcctgaagtgcaacgccgagctgtccaacattgccgagattggaggatctgccgcaggcggcatcctgagaatcaacaaggacatcaccaagattaacttcgagatcgtccatgtgtctccctgcggcctgaaaaccatcgtggtcaaagtgggatcc

SEQ ID NO: 255 - DNA, 4245 bp, Artificial Sequence
  OMNI nuclease sequence
ggtaccaagcagcggcaagagtactacatcggcctggattgtggcacatcttctgtcggctgggccgtgaccgatgagaagtacgacctgctgaaaacaaagcggaaagtgaagaagaacgacaagaccaagagcaagcagtgcaccctgtggggcgtcagactgtttgatgaggccgaaaccgccgccaccagaagaatcgccagaagcacaaggcggcggaacgccagagccaaagagagactgaaactgctgcggctgctgttcagggacgagattgctaaggtggaccccgagttctacaaccggctgagagagagcttctactacgaagaggacaagaacctggtgtccaagtccaagaacaccctgttcaacgaccccgacttcaccgacaaggactactacaatctgtaccccaccatctggcacctgagacaggccatcatcaaggccgacgacaacgtgcacttcgatatccggctgtacttcctggccatccagcacattctggcccacagaggccattttctgctggaaggcgatatcggcaaaggccaggccagcttccagcctatcttcgacgtgttctacgacgcctgcgaggattactaccggctgaacaatagcgccgccagcagcgtggaacggatcatcgaggacaagtctaagtctaagatcgacaagaagaaagagctgaaagagatcctgtttatcgaggacgacggcgacgaggaagccctgaaaggacaaacagaactggccggcctgctgatcggcagcaaagtgtccctgaccaagatcttcggcatcgagtccgacgaggacttcaagtactctttcgccgagggcgtgttcgaggataagatccccgacatcgagatggccattggcgccgagaacatggacctgatcagagccgccaaacaggtgtacgactacgccatcctgcataacctgctcaacggcagagagtacatcagcgacgccatggtggccaactacgaccagcacaagaaggacctgtctgccctgaaactggccttcaagcctctgcctgagagctacaacaagctgttcaaagagaagatatacgacgccagcaagacgcccaacaaggacttccctatctaccaggcctacattggcaaggccagaagcgccaagggaaagcctgctctcgtcggccaggatatcttcaacgcccagctggtcaacctgatggaaagcagaggaatcaccggcgagctgctggatagagcccaaaaaggcgaactgctgcccaagcagagaggacaggccaagggtacaattccccagcagctgcaccacaacgagctgaagatcattctgaacaagctgacccaggactaccccagcttcggcgtggaaaatcagagcgagagcgagaagtacaacaccctggccaagaagatcgcctctatccactccttctgcatcccttactactgcggccccatcgtgaagcagaagtatgacgagcagggcaagctgatccctggcggcaagtctcagtttagctgggccgatgaagagatcaccgaactcgtgcggccctggaacttcgacagactcgtgaacaaggaccagcgggccaccaacttcatcagacggatgaccaacgagtgcacctacctgctgggcgagaacgtgctgcctaagagcagcctgctgtaccaagagtacatgctgctgaatgagctgaacaacctgcggatcaacggccagcggatcgacaacgaactgaaaaagaccatctttgagcagggctacctggccggcgaactgaacggcaatatcaccatccacagcctggaacggtggctgaagaacggctttatcagacccgatgatgagctgagcggcgccagcgagacaaagtatctgcctaagctgcagacctaccaggacttcagaaagatcctgggcgaagatttcgagaagaagtactccaacaagcagctcgagagagtgatcgaggccatcaccattctgggcgacgagaaacagatgctgacccggcggatcagaagcgagctgaattgctctgaggaagtggccaaaaagctggccaagcggagctacaaggactggggcaagttcagcgccaagttcctgaatggcatcaccgtgaacaaccagaccatcctggactggctgtgggacgacaacaagaatctgatggaactgctgggacaagaagtcggcttcggcaaggtggtggaagagtacaacaatctgagcggaaagaagcccgaggctggcgccaagatccactacagcaacatccaggatctgtactgcagccctgccgtgaagagaagcgtgtggcagaccgtgaagatcgtggacgaactggccaaatctcagaagcacgcccctacaaagatcttcatcgaagtgacccgggacgaagatatgaaggccaaaggcaagtacacactggcccggaagaaggatctggaagccaagctgaagtccatcaagagcgaagaggcccaagaaatcctgaacgagctgtccaccaaagaggacagagagctgcagagcaagaagctgttcctgtacttcagccagatgggcaagtgtgcctacagcggcgagcccatcaacctggacgagatcaacaacagctccctgtacgacatcgaccacatctaccccagaagcaagacaaaggacgacagcatcaccagaaacctggtgctcgtgaaggccgagctggaccgggaaaagaccaacatctatcccatctccggcgagatccggggcaagatgtctagaacctggcagctgtggtatagattcggcctgatcacgaaagagaaatacgagcggctgaccagagccaccgagctgacaacagatgaactcggcggcttcattgcccggcagatcattgagacaagccagacagtgaaggccatccggaacctgctgcagtccgcctatcctgacaccaaagtgatcagcgtgaaggctggccaggtgtccgactttagacacctgttcgccaacggcatcaagttcagaaacagcgaccagtacaaggtgcagcccagacctgagttcatcaaagtgcgggaactgaatgatttccaccacgccaaggacgcctacctgaacatcgtcgtgggcaacgtgatgagcagcaccttcaccgatgatccctacagctggatcaagaagcgcgagggcaaagaatactccgtgcggcctgaactgctgttccgggcctctgaagagtaccagaagtccgacggcagaatcacacactaccccgaggtgcagaactgggacttcgccaatagcatcaatctggtgtctagcaccatggctcggaacgacatcctgtggacccggatgaactacgtggaaagctccgagatcagcgacctgcagatcgtgcctcacagcgataagaccgacggcatcctgcctatcaagagagacagcagactggcccagattaacaaatatggcggctacaacagcatcaagggcgcctttttcgccctgatcgagtgcaacaacaaaaagggcgagttggagcggcggatcgtgtctatccctcagatctataaggacaaggtcgaccagttcgtgaagaacaagtaccaaggcggcaaagtgattctgagccccatcaagtacaagagcaaactcaagatcaatggcttccccgtgcatctggccggcaaatctagtagcggcctggtgctgtataacggcctgcaactcctgctggaacccgacgagcagagatacctgaagcgggtgctgaaagccatcagcaagcggcagcagattagaggcggcagacagaaggatcagagcaaggacggcatcagccgcgagaacaactctatgattatggaagccatctgccgcaagctggccctgtttaatgccatgcctggcttcggcgagaaggccaacacaattagagcctgtgccggcgacttctccaaactggcactggatcagcagaccgatgccatctgcaacatggtcaagatcctgcggtgcaacgccgagacaggcaacatcagcagctttgtgcccaaagccagctttctcggcaagggcaccatgcctgaggacatcacccagagatacgagaacatcttcctgatcagccagtctcctgccggcctgtacgaggaacagatcgacctgaaaaccatccatcctcagaacctcaagaagaaggccgacggatcc

SEQ ID NO: 256 - DNA, 4113 bp, Artificial Sequence
  OMNI nuclease sequence
ggtaccggcaagttctacatcggcctggacatcggcaccaacagcgtgggaattgcctgcaccgacgagaactacaacctgctgagagccaagggcaaagatctgtgggccgtgcggctgtttgatgaggctatgcctgccagcgaccggcggatgaagagagctgctcgtagacggctgatgcggagaaggcagagaattgccctgctgcaagaactgttcgccctgctgatggccaagaaggacgataccttctttgtgcggctgaacaacagcccctacctgatcgaggacaagcggggcaccgacagcaaatacgtgatcttcgccgacgacgactacaatgacgccgacttctaccgggactaccccaccatctacagactgagaagagatctgatccacggcaagacccagaaggacatccggctgtactatatcgccatccaccacatcctgaagtaccggggcaatttcctgtacgagggccagtctctgtctgacgtgcgggatgtgtccagactgttcggcgacctgaacaaccagttcgacgccctgggaaatgagagcgccgtgtacttcgacgagagcaagctggaagagttcaagaagatcgccaccgagaagagaggcatcaacgcccggaacaaagagtgcgaggaactgtttggcaagatgagcgccgagatgaagtccgccattaagctgctgctcggcggcaaggtggtgctgagcaagatctttggaagagagcccgccgagggcgagaagtccgtgacctttaagagcctggacgatatcgccttcgagacactgatgcaggacttcagcgacgatgaggccgaggtgctgatctccctgaagaagatctacgacaacctgaccttcgagagcgtgctcggaggctacgagtacatctctgatgccctggtggatatgtacgagaagcacaaggccgatctgaagaagctgaaggatctgctgcggggccacaagaaactgtaccacgccatgttcagatacgtcgtgcggagcgacggcgagaaagagaacaagtctgaggacaaagagggcaagaagcagcccgccaattacgccagctacgtgggctacaccaagaccaacggcaagaaaatcgcctgcaagcgctgcgtgaaagtgaaggacttctacgacttcgtgaagaaaatgctgaccgaccaccggggcgagctggataatgatgctctggccgatgagatcctgggcgacatcgagaacgagacattcatgcccagaatcctgaacgccgacaacggcacattcccctaccaagtgaacgagcaagagctgaaaaagatcctcgagaacgccgagaaggatttccccgagttcagagaggtgtccgagggctgtacactgagcgagaagatcctgagcctgctgcggttcagaatcccctactatgtgggccctctgaacacctaccacgaggacaaaggcggcaatagctggatggttcgcagagccgccggaagaatcaccccttggaacttcgatgagaaggtggacaagaagaagtccaacgagaagttcatgcgccggatgaccaacaagtgcagctacctgcacggctgcgacgtgctgcctaagtgcagcatcctgtaccagaaattcatcgtgctggaccagctgaacaagctgcagatcgatggcgaacctgtgtctgtggccctgaagcagagaatctttgacgagctgtacatgacccgcaagagcgtgtccaagaacaacatcaaggactacctggtcaagatcgggcagatcagcgaaaaagagaagaaggacaccgacgtcaagtgtggcgccgacgatttcaaggccagcatgagcacctacttcaccctgaaaaacattctgggcgacctggtggacaaaaatgagcagctgtgcgaggatatcgtgctgtggcacaccctgaataccgacaaagaaaatgtgcgcgagctgatcgaagagaagtacggcgacatccccgaagtgatgaagaacatcagagccctgaaaggcctggtgttcaaggactttggcaagctgtcccgcgagttcctgtgtgaacttcctggcggagtggacgagaataccggcgaggtgtacacaatcctgggagagctgtataagacgaacaagaacctgaacgagctgctgtgggctgacgagtactccttcagaaagtccatcgacaagatgaacggcgctgcctctcctgacgtgacctacgaggatgtggaagaactgtacgtgtcccctgccgtgcggagaggaatttggcaggccctgagaatgtgcgacgagtacgtggaagccctgggcagaaagcccgacaaggtgttcgtggaagtgaccagatacgacgacaaagagaaaaaggggaagaaacagaagtcccggaaagaggaactcgaagaactctacaagcagtgcgacggcatcgacgacctgaaagccagactgggcgccaagaacgacgtggaactgagacaggacagactgtacctgtacttccggcagctgggcaagtgtatgtacagcggcgacaatatcgagctggacgccctgatgagcgaccagtacgacatcgaccacatcatccctcagagcctggccaaggacgacagctgggataacagagtgctggtcaagtccgagctgaatcggagaaagaccaatgactaccccgtgcctgacttctgcagatcttctggcgctgtggcccactgggaagtgctgaaaaaaaagggcctgatctccgagaaaaagtacaagcggctgatgaggcggacccctctgaccaatgaggaactggaagccttcgccgccagacagatcgtgtttaccggacaggcctctaaggccgtggccgaactgctgcggagaaagtacaaaaccgacggcaaaaaggtggtgtactacagcaaggccggcaacgtgtccgatttccggaaggaccacgacttcatcaagtgccgggacaccaacgatctgcaccacgccagagatgcctacctgaacatcgtcgtgggcaatgtgtacgacgccagatttggcagcctgtaccgggacctgaagaggggcaagcccatcatcagcaacaacgccgaaaagaagctgttcacctacactatccctggcgcctgggacaaagacaagagcatggccgtggtggaaaagacactggccaagccttctatgtgcgtgacccggtactcctacatctccaagaacgtgttctacaagatcaaccctctgagcgctggcgcctctggaatcagcgtgcccagaaaagagacattcccactgaacaataccgagaagtatggcggctacaccggcctgagcacagcctactttgtgctgatcctgtctaagaacatgcggggcaaagagatcaagaccatcgacggcgtgcccgtgctgatcgagtataagaccaagggcgatatcaacaagctcgaggaatacttcgccctcaacgacaagtacatcgagcccaagatcctgctgaagatcaagaaggatagctgcctgaaatacggcaaggcccctatcattctgaccggcgtggccgataatgcccggctgtctatgcacattgccttcgagtggttcgccagcgccaggatcgacaaatatgtgaaggccctgaccaagtgccgcgagtttatcgacaagggctacttcagcagaagcgccgaaacctacaccgtgaacaagagcagcatcagcaagaatggcgtcgtgatcgaccgcagcgccaacatcgagctgtatgacatcatcctgaaacagctgagccgggatgagtacgacgtgggaaacatcaagtccctgctggacaatctgaccgagcagcggaagctgtttgccagcctgacctgttacgagcagatcaagctgctgattgagctgacccgcattctgaagtgcagaagcaagggcaagcctatcgacctgagcctcctgaatatcaaatacgtcgcccctcggatcaaaaagaatatcagcaacgtggacgtgttcctggtcaacgatagcccatgtggcctgcacaccgtgatcagaaagctgggatcc

SEQ ID NO: 257 - DNA, 4272 bp, Artificial Sequence
  OMNI nuclease sequence
ggtaccgacaaggtggacaagaacttctacctgggcctcgacatcggcaccgattcttgtggatgggccctgaccgacgaggactacaacgtcgtcagagtgaagggcaagaaggcctggggcgtcagactgtttgatgacgccgaggtggccaaagagcggaggacaaaaagaaccgccagacggcggctgcagagaaagattctgcaggccgagtggctgagagagatcttcagcaacgaggtggaaaagacagaccccaagttcttcgaccggctgaagtacagcaacctgttccgcgaggacaaagaactgatgggcatcaacagcaagtacagcctgttcaacgacgtgctgaaacaggtctacaccgacaaagagtactacgccaagtaccggaccgtgtaccacctgagagaggaactgctggaaaagcccgccgacgacatcagactgctgtatctggccgtgcacagctttctgacccaccggggacactttctgtatgagacagccgaggccgacaagatcgacatcaccgccatgtacaacgatgtgctgtccaagctgaacgagctggaatttgagaacgggcagatctttagcctgagcgaagtggaagagaaggtgttcaccgacctgctcgagaacttcaaagagggcctgagcctgcgcgagatcaaagagaacttctccaacaacatcggcgccaagaacaagagagagaaggacctggccaagatcatcatcagcggcaagttcaagctgaaggatctgttcgaagtggacaaagaggacaacatcgacgttgacttcagcagcgagaagtacgagcaagagacatacggcaagatcagcgagatcctgggcgacgatgagaagctggccatcgtggacaagttccagaacatctacagcagcatccagctgaagaagctgctgggcgagcacaagtacatcagccaggccatggtggctaagtatgagctgcacaacaagcagctgaaagagttcaagaatttcatctccaagtactaccccagcaagaagtcctacatcttccggaacgccggcaacggcgataagctggtggtcaacaattacgcccactacgtgtaccagacactgaccggcggcaagaaacaagtgatgcagaagagagccgccaaggacaacttctacagcttcgtgaagaagatcctggaacaagagcctgagatccccgtggaccagaatttcgaagagtacaaagaatacgtgatcagcctgatggacaagggcgagttcctgcagaagatccgcagccacgataacaccgtgctgcccaacagcctgtacatgagcgagctgaaaaaaatcctcgaggtgtccttccagaagttcgacttcctgaaaaccatcgacgagacaggcctgagcggcaaagagaaaatcctgcagatcatcagcttcagggtgccctactttgtgggccccatcggcgatagcaagcctgagtttagctgggccgagcggaaagaagatatgagcctgaggccttggaacctgtctaagatcatcgacctgaacaaggccgaggacggcttcatccagcggatgaccaacaagtgcacctacctgaaggataaggacgtgctgcctaaggacagcatcctgtacagcaagttccgggtgctgaatgagctgaacaatctgaagatcgacggcaacagcatcagcgtggccgtgaagcagagcatcttcaacaacctcttcaagaaagagaagaaggtttccaccaagaagctcctcaacttcctggccgccgagaatgtgatcagcgccgatgatatcaagaacgtgtccatcaccggcatcgacaaagaatttgccaacaactacgcctccttcgtgacgttcagcaacagattcggcgaagagttcgtcgagaagaacatcgacatcttcgagaagatcattaagtaccacaccatcatctccgacaagagccggctgcaagagcggattaagagagagttcgatatcttcaccgacgacgatatcaagtggctgaagtccctgaacttctctaagtggggcagactgagcagagagttcctggaagagatcctgttcgccgacagacggaagcaagaggacctgaccgtgaaagagaatttcagcgaccgctacgtggaaaagctggataacggcgaggtgtacagcgtgatcgaggccctgtgggagacaaacaacaacctgcagcagctgttcgaccggaccaactacaccctgggcgatatgatcgagcagaccgaacagaagctgggcagagatctgacatacctggacgtggacgagatgtactgcagccctgctgtgaaaagaggcgcctggcaggccatcaagattatcaacgagatcaagagcgccatcggcaagtaccccgataagatcttcgtggaagtgacccggcacgacagcgtgaaaggcgagaagggcagaaaggacagccggaagcggaacctggaaaaactgtacaatgacagcaagctcaaagagatgtgcaagcagttcagcctcgagtacaacaccctgatcaacgaactcaacaagagcgacgtgtccaacctgcggagcgacaagctgttcctgtacttcctgcagctgggcaagtgcatgtacaccggcgagcctatcgagatcgccgacctgtacgacgacaacaagtacaacgtggaccacatcatccctcagagcaagatcaaggacgacagcctgaacaacaaggtgctggtcaagatgatcgccaacaaagagaaggataactactacccgatcagcgacatcaagcccgagtggcagatccggcagaaacacttctggcacatgctgaaggacagaggcctgctgagcgccgagaagctgtccagactggaaagaaccgagccattcaacgagcgcgaagagatcgacttcgtgaaccggcagctggtcgagacaaatcaagagtccaaggccgtgatcgacctgctgcggaaggtggtggacaaccccaccgacatcatcttctccaaggccaacgccgtgtccgacttcagaaagaaatacgagatctacaagtcccgggaagtgaacagcctgcaccacgccaaggatgcctatctgaacgtggtcgtgggcaacgtgatctacaaccggttcaccgccagattctgggacagacgggacaacgacaagaacagccgggaacacgtgaccagaaactacaccaagctgtttgagggcaatgtgtggtcctgcagaggcgacaacctcgtgtggaacaaggaccgggacctgacaagagtgaaagcccagtgcgagcagaacaactgcatcgtgtccgtgatgccctacgtgaacagcaatggcaagttctacaacgacaccgtgtacaagagcaagaagaaggaccccaacaccagcgccagcttcgctctcaaaggcgagggaaagctgctgtccgacatcgagaagtatggcggctacaatagcctgtccggcgcctactttatggtggtggaaagcgagggcaaaaacgggaagatcaaaaagaccatcgagacagtgcccatcatcatcgagtataagtaccgcaacgaccccgacaagcaagaaaaaatcatcaagtacctggaagaacagaacaacatcaagatcaccaaagtgatcatgagcgtcctgaagtataagagcacactgaacatcggaggcggcctgtacaccctgaccggcaagaccaacaactccctgatgatcagcaaccagatccagtggcacatcaacaacaagaataccgcctacgtcaagaccctggaaaagtacctgagcatgagcgacagcacaaaagagaaactggccaaggccgacgactacatcgtggtgtctcccggcatcaaggacaagacccaagaagtgcggatcacccggcaagagaatatcgagctgtacgacctggtcatcaggcagctcaagaagaaaatctacaacatcagctccatcaagggcgtgctgaacacactggaaaacagccggcggaagttcaacctgctgaacctggacgagcaagtgaagcagctcaacaatatcatcagatacctcggcggcagctacagcgtggacctgattcttcttggcggagttggcagagccggcgctaccacaatcggcaagaacatcaccgatctggacgtgaaagtgatcgtgcagagcgcctccggcctgaagagaaaagagatcaagctgggatcc

SEQ ID NO: 258 - DNA, 4242 bp, Artificial Sequence
  OMNI nuclease sequence
ggtaccgccaagtacagaatcggcctggacgtgggcacaaattctatcggctgggccgtgaccgacctgaacaacaagctgatcatgaagaagggcaagaaactgctgggcgtgctgatgttcaaagagagcagcggcggagacaaggaccctaacaagctgcggagaacctaccggtgcagcagacggcggatcagaagaagaaaagagcggctgaactacctgaacgagatcttcgcccctgagatcaacaagatcgaccccaccttcttcgagcggctggacgagtctttcctgaagctggaagatcggaagtacaaggacaagtacaccctgttcatcgacaagaacttcaacgacaagacctacttcaagaagttcaacaccatctaccacctccagaaatacctgatggaatccgagaagaaagaggacatcagactgatctacctggccatccggcacctgatcaagtaccggggcaacttcctgaacagcagcaaccccgacaactacagctccaagatcgatgagctggacttcctggaacggctgacccgggtgttcgagatcatcaacagctacgagatctacagcaagtttaacaagcccatcctggacatcaacgacatcaagtctctgatcaaggccaacaaggacagcaagggcatcaactccaagaaagagaacttcatcaagatcttcaacaaagaggaaaagaagaacaacctgatcgacttcgtggccagcctgctggccggatcttctgtggaactgaacaagattctgaagaaggacgaggacggccctcagaacagcatcaagattagcttcaccgacgacctgaccgagaagtttctggaactgagaagcgagtaccccgagtacgacgacttcatcagcagcatcgaggacctgtaccggctgtatcaggccctgtacatcaacaaatacgtgcagaacagcctgcctcagaccatggtggaaagattcaacacctacaagaccgacctcaagctgctgaagggctacatccggaagtactacagcaccaaatacgacgaggtgttcaactccatcgagaacaagatgagctaccctcacctcgtgcggcactactgcagcgacatcgacaaaaagaccaaagtgaacatctccaacgataagagcttcagccggatcgagttcatcaattacctgaagaacgagttcagcttcgaccaggacgacgagctgaccctgaaactgaaagagcggatcaactccgacgatttcctgctgacccagagcgacaagagcaacggcaatttcccctaccagctgaattacttcgtgctgaagaagatcatcatcaatcaagagaagttctacagcttcttcgacgagaaggactccaacggctacgtgaacaaggataagatcatctctctgctgaccttcaagatcccctactacatcggccctctgtccaacaactacgacgagagcgacgagaacaaccacgcctggatcatccggaaaaaagagggccacatcagaccctggaacttcgatgagatcgtgaacgtggaagatagcgccaagaaattcatccagcggatgcagaacaagtgcacctacctcatcaacgagtactgcctgcctaaggatagcatcacctttcagaagtacctggtctaccagcagctgaacaccctgtacgtgaacggcaagttctacttcaacagcgacaacaaggatgacctgatcattaacctgtacagcaagaaccggaagatcaccaagaagctgctgcaggactatctcagcaacaagctcaaagagaaggtcgtcatcacctacaaaaacggaaaggacaaggacgtggaacccaacctgcacagcctgagcagcctgttcgatttcatcaaggtgttcggcagctacgaagaggtggacaagaacatcgacctgattgagaacatcatccgggatatcgccatcttcgaggataagtccatcctggcctccagactggaaaacgagtacaagctgaacaaagaccagatccgcatcatcaagagctttaactacaacaagttctcccggctgagcaaaaagctgctggacggcatcaagcccttcgataagaacggggtgctgatcaacaaaaccatcctgaccattctgaaggactacgacggcagcgagaacaaacccgccacactgatggaaatcctgaactccaaggactctgagtacgacttcgacagcgtgatcaagatcgagaactccaaagaagaagagaacgagagcgtcgacagcttcatcgagaatagctacctgccaaagatcagcaagcggcccacaatcctgacctgccggatcattgaagaactggcccacgctctgaaggccaatatcagcgaggacttcgagttctacatcgagtgcgcccggaccaacaagtccgacaagaaggccaccaagacacgctacgagaagctcatggaaaccctgagcaagtccggcctgaagtctcaggtggactccctgatcaacgagctgaagaaatacgagaacgacaagtccaagctgaatgccgagagcctgtacctgtacttcatgcagctgggcaaagacatgtacaccggcgaccagattgacctgaataccatcattgagaattacgacgtggaccacatcatccctcggagcctgattaagaacgacagcctggataacaaggtgctgacagagaaaaaattcaacaacggcaagagcaatatctacccgctgtccaaaatcgacctgtgggagtacaacggcggcagaaagaaggccctcgagttttacaagaagctcaaggacaacaacctcatctccgagcggaagtatatcgccctgaccgccaacaccgatctggacaatgataccctggaaggcttcgccaacaagcagctgtccaccaccaatcagtccgtgatcggcctgaaagaagtgttcgaggactactactccatcaatagcgagaatatcatcctgtccaaggccgagaacgtgtccgacttccggaacaacttcgacctggtcaagagccggacagccaacaacttccatcacgcccaggacgcctacctgaatatctttgtgggcagcgccgtgaacagctggatcaagaatatcttcaagctgtggcggatcgacgagtccaacgagcacaagtacagcgatttcgtgtccttcgtgcgcgagaagcggtacacactgaaccctatcaagatcatggaaaagtacgtgaaggaccagtccgacgagtttaatgagctgaaggacgtgatctacaactacaagttcatcttcaccaagacgcggacctatatcaagaaggacttcttccccaaatccaccgtgtacgccgccaacagctgcgccaacatcaataccaagaacaatctggactgcaagaagtacggcggcttcaaagagtacgccttcggctactacgtgctcatcaagaccaaggataacaaattcattctcgagcccgtgccgtacatctttagcaagaacgccaaccagtacctggacaacctctacaagaagaactacgaaatctacctcgacaacgtcaagatcaacaccaagttccagattgagaagcggcagtttatcatcaccggcaagaccgtgaactcctatctcgtgcggaactctatcgagcggttcttcccctacgatctgatcaaaatcatcaaaaaggtcgacaactttatgaacttcctcaagctcaacaaaatcgccatcaacgtgaagaatcaagagtccatcaacaaggccatcgacgacctcaacaatctgcacaagatcaaagataagaacaacgaactgatctccaaagagaacaagttcggcgagatcgagacactgaccagcaacgagcttatcaacgtgttcgactacctgttcaccctgtatagcaaggatgccttcagctactccttcagcaaggccctgatctatgagcaagaggaactgaaaaacaagtttatgaatctggacatcctgctgaaaacctacaccatcagcgagatgctgaactatctcaagacgaacgagcggaaaaagatcaatctcatcaaactggacaaagaagagaattgcggcaagctcacccagaacaaagtgctgcctctgggcaccaagatcattttcgagagcaacaccggcctgtacaagaaagaaatcatcctcaagggatcc

SEQ ID NO: 259 - DNA, 4242 bp, Artificial Sequence
  OMNI nuclease sequence
ggtaccgccaagtacagaatcggcctggacgtgggcacaaattctatcggctgggccgtgaccgacctgaacaacaagctgatcatgaagaagggcaagaaactgctgggcgtgctgatgttcaaagagagcagcggcggagacaaggaccctaacaagctgcggagaacctaccggtgcagcagacggcggatcagaagaagaaaagagcggctgaactacctgaacgagatcttcgcccctgagatcaacaagatcgaccccaccttcttcgagcggctggacgagtctttcctgaagctggaagatcggaagtacaaggacaagtacaccctgttcatcgacaagaacttcaacgacaagacctacttcaagaagttcaacaccatctaccacctccagaaatacctgatggaatccgagaagaaagaggacatcagactgatctacctggccatccggcacctgatcaagtaccggggcaacttcctgaacagcagcaaccccgacaactacagctccaagatcgatgagctggacttcctggaacggctgacccgggtgttcgagatcatcaacagctacgagatctacagcaagtttaacaagcccatcctggacatcaacgacatcaagtctctgatcaaggccaacaaggacagcaagggcatcaactccaagaaagagaacttcatcaagatcttcaacaaagaggaaaagaagaacaacctgatcgacttcgtggccagcctgctggccggatcttctgtggaactgaacaagattctgaagaaggacgaggacggccctcagaacagcatcaagattagcttcaccgacgacctgaccgagaagtttctggaactgagaagcgagtaccccgagtacgacgacttcatcagcagcatcgaggacctgtaccggctgtatcaggccctgtacatcaacaaatacgtgcagaacagcctgcctcagaccatggtggaaagattcaacacctacaagaccgacctcaagctgctgaagggctacatccggaagtactacagcaccaaatacgacgaggtgttcaactccatcgagaacaagatgagctaccctcacctcgtgcggcactactgcagcgacatcgacaaaaagaccaaagtgaacatctccaacgataagagcttcagccggatcgagttcatcaattacctgaagaacgagttcagcttcgaccaggacgacgagctgaccctgaaactgaaagagcggatcaactccgacgatttcctgctgacccagagcgacaagagcaacggcaatttcccctaccagctgaattacttcgtgctgaagaagatcatcatcaatcaagagaagttctacagcttcttcgacgagaaggactccaacggctacgtgaacaaggataagatcatctctctgctgaccttcaagatcccctactacatcggccctctgtccaacaactacgacgagagcgacgagaacaaccacgcctggatcatccggaaaaaagagggccacatcagaccctggaacttcgatgagatcgtgaacgtggaagatagcgccaagaaattcatccagcggatgcagaacaagtgcacctacctcatcaacgagtactgcctgcctaaggatagcatcacctttcagaagtacctggtctaccagcagctgaacaccctgtacgtgaacggcaagttctacttcaacagcgacaacaaggatgacctgatcattaacctgtacagcaagaaccggaagatcaccaagaagctgctgcaggactatctcagcaacaagctcaaagagaaggtcgtcatcacctacaaaaacggaaaggacaaggacgtggaacccaacctgcacagcctgagcagcctgttcgatttcatcaaggtgttcggcagctacgaagaggtggacaagaacatcgacctgattgagaacatcatccgggatatcgccatcttcgaggataagtccatcctggcctccagactggaaaacgagtacaagctgaacaaagaccagatccgcatcatcaagagctttaactacaacaagttctcccggctgagcaaaaagctgctggacggcatcaagcccttcgataagaacggggtgctgatcaacaaaaccatcctgaccattctgaaggactacgacggcagcgagaacaaacccgccacactgatggaaatcctgaactccaaggactctgagtacgacttcgacagcgtgatcaagatcgagaactccaaagaagaagagaacgagagcgtcgacagcttcatcgagaatagctacctgccaaagatcagcaagcggcccacaatcctgacctgccggatcattgaagaactggcccacgctctgaaggccaatatcagcgaggacttcgagttctacatcgagtgcgcccggaccaacaagtccgacaagaaggccaccaagacacgctacgagaagctcatggaaaccctgagcaagtccggcctgaagtctcaggtggactccctgatcaacgagctgaagaaatacgagaacgacaagtccaagctgaatgccgagagcctgtacctgtacttcatgcagctgggcaaagacatgtacaccggcgaccagattgacctgaataccatcattgagaattacgacgtggaccacatcatccctcggagcctgattaagaacgacagcctggataacaaggtgctgacagagaaaaaattcaacaacggcaagagcaatatctacccgctgtccaaaatcgacctgtgggagtacaacggcggcagaaagaaggccctcgagttttacaagaagctcaaggacaacaacctcatctccgagcggaagtatatcgccctgaccgccaacaccgatctggacaatgataccctggaaggcttcgccaacaagcagctgtccaccaccaatcagtccgtgatcggcctgaaagaagtgttcgaggactactactccatcaatagcgagaatatcatcctgtccaaggccgagaacgtgtccgacttccggaacaacttcgacctggtcaagagccggacagccaacaacttccatcacgcccacgacgcctacctgaatatctttgtgggcagcgccgtgaacagctggatcaagaatatcttcaagctgtggcggatcgacgagtccaacgagcacaagtacagcgatttcgtgtccttcgtgcgcgagaagcggtacacactgaaccctatcaagatcatggaaaagtacgtgaaggaccagtccgacgagtttaatgagctgaaggacgtgatctacaactacaagttcatcttcaccaagacgcggacctatatcaagaaggacttcttccccaaatccaccgtgtacgccgccaacagctgcgccaacatcaataccaagaacaatctggactgcaagaagtacggcggcttcaaagagtacgccttcggctactacgtgctcatcaagaccaaggataacaaattcattctcgagcccgtgccgtacatctttagcaagaacgccaaccagtacctggacaacctctacaagaagaactacgaaatctacctcgacaacgtcaagatcaacaccaagttccagattgagaagcggcagtttatcatcaccggcaagaccgtgaactcctatctcgtgcggaactctatcgagcggttcttcccctacgatctgatcaaaatcatcaaaaaggtcgacaactttatgaacttcctcaagctcaacaaaatcgccatcaacgtgaagaatcaagagtccatcaacaaggccatcgacgacctcaacaatctgcacaagatcaaagataagaacaacgaactgatctccaaagagaacaagttcggcgagatcgagacactgaccagcaacgagcttatcaacgtgttcgactacctgttcaccctgtatagcaaggatgccttcagctactccttcagcaaggccctgatctatgagcaagaggaactgaaaaacaagtttatgaatctggacatcctgctgaaaacctacaccatcagcgagatgctgaactatctcaagacgaacgagcggaaaaagatcaatctcatcaaactggacaaagaagagaattgcggcaagctcacccagaacaaagtgctgcctctgggcaccaagatcattttcgagagcaacaccggcctgtacaaaaaagagatcatcctgaagggatcc

SEQ ID NO: 260 - DNA, 4530 bp, Artificial Sequence
  OMNI nuclease sequence
ggtaccaaagagaaggccatcacactgggcctcgacatgggcacaaattctctcggatgggccgtcgtggacaacagcaccaatgatctggtgtcctaccacggacaccccatgtggggcgtcagaatgtttagcgagagcagcagcgccgaggaccgcagaaaaaaaagaggcgccaggcggagataccagcggagaaggcaaagaatcctgctgctgagagagatcttccagaaagagatctgcgacaaggacccctacttcttctaccggatggaccaggccttctacgtgtccgacgatagaaccgacgaaggcaagggctacctgctggaaaaccagaaggccaccaaggacttctacaacaagtaccccaccatctggcacctgagatacgacctggtcaccaacaaagagaaaaaggacatccggctggtgtacctggccatccaccacatcctgaagtaccggggcaatttcctgcacgagggcgatatcgagctgagcgccaagcctaacgacgagctgaagatgttcatcagctgcatcagcagcacctacgagggcaacttcgagaaagaagaggacgacgacaacgccaactgggacaagtacttcgtggtggaacagatcaacaacgacaagttcatcgacagcctgatcagcatcatcgacaactacctggaccgcagcaagaaactgaccgaggtggtggacccctccaagaagagatacgagctgttcgccgacgaactgatccagctcgtgggcgagcctaagaacatcctgacagagctgctgcccgacgctctgtttaagggcacagtggacctgagcaagaaccggatctacaaagaaatctacaagaaccagatcgacctggacaagaaggacctcaagatcatcttcaacagcgacgatttcgagaacaagatcagcaacctgagcagcaagctcaaagagatcagcccactgatcgagggcctgatctacctgaagtccatctataacaactactacttcaaggatttcatgaagggctacagcagcctgagcgaggccttcatcaagaagtacaacgagaacaaagaggatctgaagtccctcaagagctactacgataagtacctgagcgacaagaaaaacagcatgttccgggacaacaaagtgaacaacaacttcgtgaactacatcggccactacagccccaacgagaagaaccccgatggcaagtcttggagcgagggcgagatcatcaagatcgagaagaagaagtccgactacagcgagttcctgaacaagctgaaagaggacctgcgggactccctgaacaaataccccgaggctcagaaagaggccgacggcttcctgaagaagatcgaggacaacaccctgctgcagcggctgaacaatgccagcaacagcgtgatccccatgcagttcaacaagaaagaactggtggccatcatcaacaaccagaaagaatattaccccgacctgttcaccgacagcaacatcagccacatcgagcagatctttagcttcaagcgcgagtacttcatcggccccatcgacttcgataagaacaacaagagcaagttctcctgggtcgtgcagaaagaaaccgctctgaacaagaagcagaagatctacccctggaacttctacgacgtggtggataagaaagagacacagaagaacttcatccagcggatgctgaaccactgcacatacctgaagggcgagaacgactactgcatccccagcagcagcatcagctatcaggccttcgtgtgcctgcagtacgtgaacaaactgagggactccaacaacaacctgatctccgtggacgccaagcagcagctgttcaaggacctgttcctgtccaacaagaccgtgaccgctaaagaaatcaaagaatggatgtaccagcacaagctgggcaacaccgccagcattcctacctgcaactgcaacatgagcacctacatcagcttcaagaacctcaacaagtataagaagtacgagttcctccggcttgagcagatcaaagaaattgacgagatcgtcaagctgatgatgatcttctccgacaaagaaacccggaacgacatcctcaagaacgattaccacttcgacgacgaggacatcaagcagattaagggcttcaactacaagaattggggcagactgtccgacagattcctgaacgccatccggatcgagtaccacgacgaagaggccaacgagcacagagagtacaacagcctgaacaacgtgctgtggttcaccaacttcaacctgaacgagatcctgttcaaccccaagttcaacttccacgatgagatcgaaaagtataatgagaacaagtacatcgatttcaaagagtccgacgacgactttctcaagaactggatggaaaagaacgtgtgcgtgtcccctatctggaccagatccttcgtgcagacctacaagctcatcaaagaagtgaacgaactcctcaaagaggaagggaaagagattagctactacagcgtggaatgcacccgggaaaacaagagcgacaaaaagggcaaagagacatgcagcagatacgatcggctgctgaatatcttcaaggacaaggactttaacaaagaagccatcgaccagggcatcaacgtgtccacactgatcaagagcctgcaagagaacaaggatagcatcaacaatagcgactacttcctgctgtacttccagcagctggggaaagacatgtacaccctggaacctatcaacgacctggatgagattggcaccaacaaggcctacgacatcgaccacatctaccctcagtctatcctgaaggacgacagcatctccaaccgggtgctgaccaagagcaccatcaaccgggacttcaagaagaacaagtttctgagcgaccccaactgcggcctgaagctgcctaaagaagccttcagcttctacaagttcctgttcgacaactctctgatcagccggaccaagtacaaccggctgaccgaaaaagaaattcacgtggacagcctcgagagcttcatcaacagacagaaggtggccacagaccagtccaccaaggccattattgagctgctgaagttcctcgagacaaacaagtactgcgagcggaacaacgagatgagccgcgacgaagccagaaaagaagccgagaagcacatcatctacagcaaggccggcatcgtgtccgatttccggaagaagtaccagatctacaagtcccggatcgccaacaactaccatcacgcccacgatgcctacctgaatgccgtgctgggcaagaccctgaaagagtattacgacgataagaaaatctacctgttcggggacgaactcaagaagcgcatccagaacgacggcgagtacaccatcaatcccgacaacatcctgtctaagagagtgcgcgagagcaaggaccaccacattatctggggcggcatcaaagagatagacttcatcaaaaacaacattcagaacaatttcgacatccgggaaacgatgtacacctactacggcaataccctgatcggccaagagacagtggaaggcaagaaaggccagggaaaagaaaccatcaagtctctgacccctaacggcaacaaaatggacctgaagaaatacggcggctacaagcaggccagctatccttacttctacctcatcgagaaaaacaacggcgaggccatgatctgccccatcaacagcttttacaaggacgactccaagatcgaccggttcatcgaggaaaatttctttaagaaggacaaagagaataccgacaagggcaagcccctgttcaagaaaatcctgaaactgaagatcaacaccgtgattctgagcccgaaggacgataacaagcacctccggaagatgtatatcaccggctccaaccagttcgacaaggatctgcggatcaagaacggcttcgaccggaacttcaaaaaagaagatatgcggaccatccacatgatcaccaagtttatcaaggtgtacgaactgaacgactgcttcgagaactgcaaccccagaatcgagttcgggatcaacgagaataccaacagctacatccagctgaagaacggcaacgattgcttcctgatcgacgaggatattgagcacctgtacaactccatcttcgagctgtggaacaagcccatgtacaatatcgccaccaccagaaacctgattgagaagatctcccacaactacgacagctggttcaagaacagaatcctgagcaaagagcggttcatcaatatcatctatatcctgaacgaaatgctcaagtacctcaagaccaacgatagcagcaccctgaagctcaaggataactatctgaaggataacaaagacaacaaagaaaagaaagacaaaggcaaggacaccggcgtgctgaaattcggcatccacctgtataagggcatgaagatcgtgtcctacagcatcaccgggtttaagaccaaggtgctgtacaaagtcaagaagggatcc

SEQ ID NO: 261 - DNA, 4011 bp, Artificial Sequence
  OMNI nuclease sequence
ggtaccaccaagttctacaagcggttcaccatcggcgtggacctcggaacaggatctgtgggctatgccgtgatcgacggcgagtacaagctggtcaagctgaagggaaagcacgcctggggcagcgtgctgtttgataatgcccagaccgccaagaccagacggctgtttagaagcgccagaagaagattcgccaggcggagagagagaatcagactgctccaaagcctgctggcccctatcgccgaagagagagatcctggcttcttcgtgcggctgaaggattctgcccttgtgtgcggcgagggcaccttcttcagaagcaacaagtacaacctgttcaacggcgacgtgaccgacaaggactacttcgccaagtatcccaccatctaccacctgagaagatacctgatgaccgccaccgagaaggccgatcctagactgatctatctggccatccaccacatcgtgaagtacagaggccactttctggccgagggccagtctattgatgccggcggaaacaatctggaaggcagcctcgtgcggttcttcgaggaactggttaatgtgggcgccgacctgcactacatcggcaagacagagaagctggcccagatcctgaaggacaaggccaagcctagagccgtcagactgacagaagccatcggcctgtttgccgacagcggctacaccaaatacgccaagtctgcctttggcgccatgctgggctatacagtgggactgtctgatgccgtggatgctgtggccgataccgaggaaagaaccgagggcaagatcagcgacgacaacggcaaggacgtgaagttctgcttctctgccgccgactacgacgagaacgaggaaggatatctgggcgccatcgaggacagaagcgccctgtttctgctgatgaaggaagtgtacaccgccgttatgtacgacgtgatcctgcggggcaagaaaaccatcagcgaggccatgaccgacagatgggagaagcacggcaaagacctgaaggccctgaaaaccgtgttcgccgccaacatgaccaaagagcagtacaaggccttctttagcggcaccaaggatgtgaactacgtgcggtacatcggcgacaagagcaaaggctggttcaaggacagagtgtctgccgaggacctgggcaagcaagtgaagaaactgctggaagagatgcccgacagcgccgagaagtcttactgcctgagcgagatcgacaaagaggacttcctgcctctgatcaactctaccgtgaacagctacatcccctaccagttcaacgagaaagagctgaccgccatcatcgacggccagagcaagtattaccctcagctggctcaagagaaggataagatcgtgtccctgctgaccttcagacggccttactatgtgggccctctgaagggcgataagttcggatggtgcgagcagcagatcgatggcctggtcaccccttggaacttcaccgataaggtggacaccgacatcctggccgagaaattcatcacccggatgaccagcaagtgcagcgtgttcaacgatgaggacgccctgcctagaaacagcatcgtgtaccaggccttcgccgtgctgaacgagctgaacaagatcaagctcaaggatcgggaccctctgcctgtggaatggaagaaagagatgtttctgaccctgtgctgcgccaagcggaaggtgtccaagaaagatatcgccgtgtacctgcggcggaagtacaatgagcctatcggagtggacgagatcaccggcatggccgaagatagactgactgccaccatgtctgccctgtgcgacttcagatccatcctggacggcaacttcgacaagaccaagctggacgcctacgaggaaagcttcagaatcctgaccgtgtttgaggacaaggacatgcggaccaagcggctgcagagacagaacatctacaccgacgaacaagtgaagcgcctggccagcctgagatataccggctggggaagctttagcagacgggccctgactgaagttcggggcagagatggcaagaacgtgctggaaactatgtacgataccgacatgaacttcaatgagatccgctttgacaaagagctgggcttcgctgaggaactgaatggcgagggcgaagtgattgacaagttcagctacgatgagctgaaggacctgcggtgcagccctatcgtgaagcagtctgtgtggaacgccatgcggatcgtggaagaactgtgcgagctggccggaaacgatcctgaggccatctacctggaaaccaccttcgaagagaggaacaagaagtccaccagcagccgggtgcagaacctgctggatctgtacaagagcatcaagaacgacacctacttcaacaaagagtgcgaggccaacctgaagaagctggacaagagagacagactggacgacgacaaggtgttcctgtggctgctgcagctgggcagatgcatgtacacaggcgacccaatcagcttccaggacctgcctaactgccagatcgatcacatcgtgcccagaagcgtgacccctaacgacagcctgagcaacagagtgctggtcaccaccagcgccaaccagatcaaaggcggaaggcttggcatggaccctggcatcgtcagaaatatgctgcccttctgggagttcctgtacggcaagagattcatcgacagcaagaagttctacgccctgcagaaaacccagtacggcgaagaggacctgaaaggcttcatcaacagacagctggtggatacctcctacatcaaccggctcgtccgggaactgctgcagaagaggttccctaacacacacatcggcggcatcaggcagagcctgaatcacgccatgagagtgaagtacgccgagcagggcaaagccggattctacaagatccggggcctgaacgatatgcaccacgccaaggatgcctacctgacagccgtgatgggccagttcagagataagggctgtcctagctggggctccatctgcaagatgtacctgtccgagagaaccgacgtggacgcccagaatggcaaagaggaagagaaggcccggaacggcatcgtgctgggactgttcgagagacaccagaatatcaatagagatggcgaggtcgtgtgggacaagcccttcagggacaacgtgttcgagacaatggccaccaacgactgcatcgtggtcaagagactgaagaggaaggccaagagcgccttctacgatcagacactgtatggccctggctccgccaagaagaatctgatccctcagaagtatcggaacggcgagcccatgcctacagagatctacggcggctacagcaacgagaatgacgcctactacgtggccgtggactgtggcgaaggcaaaggcaagcggtacaaccggtacagactgatcggaatccccgtggtggtgcatcaggccagaaatatcgacggctatatcggcaccgtgtgcggccagaatgccaaggtgctgttccccgtgtacaagtaccagctgatcgagttcaatggccagaagtgctacattgccggcgacagcgaggtgcagaatgctacccaactgatcgtggacccacagtacgagaagctgctgtggatctgcagcaaagaagagaaccggatcagccccaaagagatcgagaagatcgtcgagcagaccccacggttcatcgagcactactgtagcaaaatcgacaagttcttcccagagtttgccaagttcgcctccgtgctgagaaacattgccgccgagaaactggacgatatggaatggggcgccaagagaaagctgatcaatgacatgctggtggtcacccaggctggcgccggaagaattgacctggataagaagctcggcggaggcagctatggcagactgtctggaaagaccatcctgcctgacaaagtgaagtggatcgaccggtctatcaccggcctgcacgagagagtcagaaaaggcgttggatcc

SEQ ID NO: 262 - DNA, 4059 bp, Artificial Sequence
  OMNI nuclease sequence
ggtaccaagagctacaacatcggcctggacatcggcacaagctctgttggatgggccgtcgtggaagagaacacccagaaaatcatgaagaagggcaagaaaaccctgtggggcgtcagactgtttgagcaggctacaacagccgccggaagaagaggcttccggaacaccagaagaagatacgaccggcggagaaagcggatcgagctgctgcaagaagagttcaaggacgagatgaacaaggccgacagcaccttcttcaccaagctgaaagagagcaagtacaacaagaacgacctgagcaacaagacgatcgccatcctgaaagaggaacagaacaagatcaacgagtataacaagaagtaccccaccatctaccacctccggaagcacctgatcgacgacaccgagaaagaggacatccggctggtttatctggccctgcaccacatcatcaagtaccggggcaacttcctgtacaacggcgagaacttcaacgtgaacaacctgaacatcgaggaacggctggaagaggccctgctgacactggtggaactggcccctaatctgggcatccccgagaactacaatgagatcctggacctgaaccggatcagcgagatcatcgtgtccccaagcaagaacgatatcaaggtcgagctgaagaaagagctggaaaagatcagcgacaacaaaaagttcatctccgagttcatcaagctgatcaccggcaacaagttcaacatcaaggacctgctgatcctcgacgagatcgagaagatgaccatcagcttcgacgacagcaactacgacgaagagtacaacgagctgcaagaggtgctgggcgacagcatcgagatcattgacagcagcaagaagctgtacgacagcgccttcctgaagaagatctttaagggcagcaacaacaccagcctgagcgccctgatggtggaacggtacaacacccacaaagaggacctgcgctttctcaaagagatcctgaacaccaaccgccaggtgtacaacagcatcttccggaccaaggacaagaagtgcctgtacgagaagtacatccacaatgagctgagctacgaagagtttaagaagtatctgctgaagcacctcgagacaaccttcgacaatctgaaggacgtggccatcatcgagaagtgtaacaagaacaagctgcggattgagaacggcgcctttctgcccagaatcaccgagacagagaacggcagatacccctaccagctgaacaaggatgagctgatcaagattatcgagaaccagggcaagtactacccattcctgctggaaaaagtggtcaacacctacaagatcgtgaagctgctcgagttcagaatcccctactacgtgggccctctgaataccaccaccaaactgaagaacgtgaagaacagcaacgcctggctggtcaagaaagtgaacaacatccagatcacgccctacaacttcgacgaaatcatcgacaagggcgccaccgccgagcagtttatcaagagaatggtgtcccactgcacctacctgctgaatgagtacgccctgcctaacaagagcatcctgtactccaagtacaaagtgatgaacgagctgaaacagatcaaagtgaacggggagaagatcgaaaacgacatccagcacaagattgtcaaagagctgttcgagaaaaccagcggcaccatcaccgacgccaagttcaagatgtacctgtacagcagcgccgacttcgacatgtacaatggcgacatcaacgtgaccggctacagcgccgatggcaagttcgccaacaacctgcagagctacatcgatttcttcggcgagaatggcatctttagcggcaccgagtacaaagagaatgacgccgaacagatcatcgagtggatcaccatcttcgacgataaggacattctcgaggacaaagtgcggacagagtaccccgctctgaacaacaagcagattaagcagatcatagataagaagtacagcggctggggcagcctgtccaacaaactgctgaccaccaagcactacaaggaccaagagacaggactgaagaagtccatcctcgacctgatgtacgagacagacgagaatttcatgcagatcatcaacaacgacgagtacgacttccagagcatgatcaaagagaacaatatcttcaaggacaccgccaagatcagctacagcctggtcaaggatctggccacctctcctgccaccaagagaggaatctatcaggccctgaaggtggtggacgagctggttaagtacatcggctacgagcccaagaacatcgtggtcgagatggccagaagcgaggataagaaagaacgcaaggacgaccggaagaaatacctggttaagctgtatgagaagtttaagggcgagatcaagaattacaaccagctgatctccgagatggaagattacgaaaagatcgatacccagcggctgttcctgtacttcatccaagagggcaagtgtctgtacaccggcacacccctgaatattgaggacctggataagtatgagatcgatcacatcatcccgcggacactgattaaggacgacagcctggataacaaggccctggtgctgaaagaatgcaaccagatcaaaaaggccggactggtgctgcccagcgagtacagaaccagccagaatatcgtgtggtggacccacctgagaaagatcggcctgatgagcgccagcaagttctacaagctgacccggaaggcctacagcgacgaggatatccagggcttcatcaaccggcagctggtggaaaccagacaagtgaccaagcacgtggccaatatcctcaacaacttctacaaaaagaccaagatcgtctacctgaaggccaacctgagccacaactacagagagagatacgagctgttcaagttccgggaaatcaacgactaccatcacgcccacgatgcctatctggctgccgtgctgggagagtacaaagaaaagtacatgaagaaaaccttgaactacaagatgatcacagagctgaacgcccgcctgaaagaactgggcaactataacaagctgaagtacggctacgtgatcaactccctggacagcgacgtgaacgacatcgtgaacgagatcagcaagagcttcgtggacgaagaaaccggcgaggtgctgttcgacgccgagcggttcaacaaaattgtcgaggataacctgtaccggaatgacatcctggtgtctaagaaaaccgagatccggaccggcgagttctataaccagaccaagcagagcaagggacgcaagggcgtgtccctgaagaaaaacatgcccaccgagatgtacggcagctacacctctctgaatcccgcctacgccaccatggtcaactacaccaagaacggccaagaaacccggcggatcgtgggcttccctatctatctgaagtccctgaacgagttcgagatcgaagagtattaccggaagctgctgggcctcgagaaggacgaactgatcagaatcgagaatatcaagatccccttctactcctacctgatctggaacgaccagctgtgttacctcgtgggagccagcaacaaagccgaagtgtgcaacgccaagcagttcaaatacgacaagtactttatgaagaagcacaagaaggccctcaacgagatcttcaacaagaaagagacaaactacaacgagtaccacaacgatatcgatgagatcattacctacatcgtggacaagatcgagagcgactacaagcttttcgagaacctggtgcctgagctgaaaatgatggtcaattacaagaaatacgagaactttaccatcgaagagaaagtcaatatcatcaagcagctgaccaagctgctgaactgcaagagcgacaacgccagcttcaagtttctgaatgagaagtactcctccgccttcggcaagaagaatggccggatcatcgaaagcaccaccatcaacagcttcagcgtgacaggcatcttctgcaacaaagaaagacagatctgggtcctcgagcagggatcc

SEQ ID NO: 263 - DNA, 3375 bp, Artificial Sequence
  OMNI nuclease sequence
ggtaccaagtaccggatcggcctggatatcggcatcggatctgttggctgggccgtgatttctgccgaagaagccggacacctggccagaatcgaggacttcggcaccagaatcttcgactctggcgaggaccctcagacaagcgagagcctgtgtaaacagcggagaggctttagaggcgtgcggagactgacccggcggagaagattcagaaaagagctgctgaagaaccacctcctgaatatcggcttcctgaacgccaccttcgaggatgagctggccgagtgcagaaacgccgatgtgtaccagctgaagctgagaggcctggacgagaagctgtctcctgccgagctgtacaagtgcctggtgcacacctgtaaccaccggggctacctcgagttctacgagcccgaggaaaatgacaaagaggccggcgaaaacctgagagccgccaatagattcgagagcgatttcagcgccagcggcaagagaaccgtgtccgagtttctgctggacggcttcagcgagaacggcttcgtgaagtacagaaacagatctggcggcgacgtgccccatctgctgatcagaagggaactgctgaagcaagagatccggcagatcctgctgtgccagaagagattctacccctgctggaacgagaacaacatcgacagagccctggaaatcatcttcgcccagagagactttgaggacggccctggcaaccccgacgatcctacaagaagataccacggctttctggaaaccctgggcaagtgccccttctacaaggacgatgccagaggcttcaggggcaccgtgatctctgatgtgttcgccgtgaccaacacactgagccagtacagatactgcaacgtgaaaaccggcgagttcagcctggaaaagaccgtggccaaagaaatcgtggacttcctgctgctgaacggcaagatcaacctgaccgacgtgaagaagatcctgacagcccacggcttcaagctgctcaagtctgacctggccgatgccaatgctctgggcaaagccctgaaattcctgcctctggccaaaaaggccgtggaagagtctggcgagagctgggaatctgtgatcgccgaggaacagttcgacgtgaccgtgccttctagactgcaccagatcggcgagctgatctccaagtaccagacacctagacgccgcaaagaagagatgaagaaagccggcgtggaccccagactgattgccgcctttgccaacaagagaatcagcggcacagccagctgtggctacagatatatgtgcgacgccatcgtggcctttctgaacggcgatatctacggcagctaccaggccaacagaatccagagcgacgccgagacagatcccgtggtcaagtctgtgaaactggcccctagcgccatcgatgaccccgaagttcgagagaacagagtggtgttcaaggccatcaacgagacacggaagatcatcaacgccattgtggacatctacggctctcccgaagagatcgtggtggaagtggccagcgagctgggcaaaagcgtggaagccagagatgagctgatcaagcggcagcgggccaacgagaaagagaatgccgaagccaagagactgctgagcgagctgctgggcatcgaggctacaaaggtgtcccctagcatgatcgagcggtacaagctgttcaacgagcaagagggcaagagcgcctactctcagaagccactgggagagctgaaggacgtggtcgagaacagggacagagtgtacgagatcgaccacatcgtgcccttcagcctgatcctggacaacaccctgcataacaaggccctggtgtttgccgaagagaaccagaagaagggccagagaacccctctgatgtatctgggagccgccgagcagaaaagctttgtggccttcgtgaaccacctgtacgcccggaagaaggacggcatctccagaaagaagtacgcctactacagatgcgagacactgtacggccaagaggccgagaaactgatgaacgagtggaaaacccggaacatcaacgacacccggtacatcaccaaatacgtggccggcctgatcgagagacatctgctgtttgccggcgacaagaaacagcacgtgcagacagtgaagggcagcgtgacccagaaatttcggagagagtggttccgggaccagagatggggctccgacgagaaggatagagagacatacctgaatcacgccctggatgccgtggtggccgctaatctgacaagaccctacatcgagatcggcagcgatagcctgaggctgctgagcatcttcaagcggagcagaggccggtacaccgaagagtacaacgagtacctggaaaaatgcgtgtccaaaatgaagaagtattacggcttcgacgaggactacacccggaagctgctgtgtagagccggcagaatccctagctttgtgcccagactggccgaagaggtggccgtcagatttgtggtggaccaagaggaaaaggacgagaaaaccttcactgaggaagtgaacgccgtctaccggctggatagcgagtttgtggtgcctcctcacttccccgtgaccagctgcaagcaggacaagaagttcagaggcacaatcgccgacagcaaccctgtgcgcgtggaaatgatcgatggcacccctcacaagatcaagaggaccgatgtgcgcgagatcaagtccgacgatctggaaaagctgtttaccaccgacgccagcctgagaacaaagctgggcgagatcctgaatggcaaggataagaactacaccgtgggcaagtatctggatgagaacggcctgacacacttcaccgcctccgatggcacagtgatcagaaaagtgtctctggacggcggcgtgttcagcaactattggagacaagaactcggcgacggcaactacaccaacctgagcatgctgaagtactactgcgtggaagtgtatgaggaccaggacggcaagacccggatctatggcatcagatacgtggacctgatccggcggaacaagaagctgtaccagaaggccgatagctaccccagcggctacggcaagcacatcatgtatctgttccccaacgacttcgtgcgcatcctgaacgagaagaacgagattaagttcgagggctactatcggagcgtgaagaacatcaatagatctcagctctggctgcggaagcccaacaacagagaaatgattgtgaagtctatcgccctgagcgacagggtgtccagagtggatgtgtccatcctgggaaagaaaggcggcgagatcagatgcagcgtgccatttccaagcaccggcgagaagaatctcggcaagggaggatcc

SEQ ID NO: 264 - DNA, 3504 bp, Artificial Sequence
  OMNI nuclease sequence
ggtaccaaagagagcctgcagtacatcctgggcctcgacatcggcatcgaatctgttggatgggccgtgatcagatgcgcccctacctatagaattgaggatgccggcgtgcggctgtttgccacaacagagcagaagcagggcaagagcaacaccaaccaggaccggcggatttttagagccgccagacggcttgtgcggcggagatctcatagaaaggccatggtcaagcggcacctggaaagaatcggactgctgaggcctggcgaggtggaagccttttttgaggaaggcggccacgacctgctgcggctgagagtgaaaggactggatgagtgtctgagccctgtggaactggccgcctgcctgatcaacctgtgcaaccacagaggctacagagagttctaccctctggacgaggaagagaagaaagagctgaccgccgccaagcggcaagagagagagcaagagtctagaggcatcgagcgcgtgaagcagatcatggaacagggccagtacagatccgccgctcagatgctgctgcaggacaaaacatttgcccctgccgatggcggccctatgcgggtttacagatctcaccctcacaaggccgatcagtaccctctgagcagagacatgctgagaaccgaggccgagaagatcctgaactgccagagccagttttacccctgcctgcggcagaactaccagacactgtatagaaaaggcggagccgatcggagagtggaaatgagcagcaccgagtttctgctgcagctgatcttcgagcagcgggactttgaagatggccctggcgacgtgaacgacaagatgagaagatacaccggctacctgagcaccctgggcaagtgtcagttctaccacggcgaagatagaggcgccagaatgacagccctgggcgatctgtatgccgccgctaatgccctgagccagtatagatacctggacaccaagaccggcgagctggttcttcctcctgctctggctcgagaactgatgacagctgccctgctggatgccgagctgcctgccaagaagatcaacgatatcgccaagaaatacggcgtgaaggccaacaacaagggcatcaagaaaaccgagctggcccctaactgcatcaagtttctgagagccgtgcggcccgtgttcgagtctgagggaattgcttgggctgacgtgctgggagctgatcctctgcaagctcagctccagcctgacagcctgctgaacagaatcggcagagtgctgagccactatcagacccctcggcggagacaagaggaactgagaaggctgcctctggctcctgtggccgccgtgaaagagacactggttaagaagctggccagactgcacctgagcggcacagccaaagtgtgcgagcggtatatgagagaagccgtgaatgccttcctgtccggcgagagctatggcaatttccaggctagactgctggccgagcaagaaagaggacctgccgttagagctgccggcaactatgtgaagctgcctccatttcctaaggacgccgactttgccaagaacagcgtggtggccagaagcctgaacgaggccagaaaagtgatcaacgccgtggtggctagatacggcagcccttgggctgtgaatctggaagtggcctctgagctgggcagaagctatgccgagagaagcgagatcgagtctaacaacaagaagaaccacgccgccaccgaagccgagaggaaggccattgccgagattatggatatcgccgatcctgccaacgtgaagggctccatgctggaaagataccggctggccgaacttcaaggctggcgctctctttactctggcgccgagtttaccgataagagggccgtgctggaccccagatctaccctggtggaagtggaccacatcgtgcccttcagcctgatcctggacaacaccctgcacaacaaggccctggtgttcgccgaagagaacagagtgaagggccagagagtgcccctggaatacctgacagaccccgctagaagaaaggccttcgtgaaatgggtcaacaagctggccgccgataagaagatctccaagcggaagcacgagtacctgctgctccaggatctgcatgattctggcctgctggacgagtggaaaacccggaacatcaacgacacccggtacattgccaagtacctgagaggctacctggaacggaatctgaagcctgccgccgagcacagatcccagttcgtgtttcctgtgaaaggcggcctgaccagccggttcagatgcaagtggctgaacgagaacacctggggcagaaaggacaaggacgagctgagaaagctgacaaccctgcaccatgccgtggacgccgtgattatcgccaatctgacacccgccacagcctttatcgccgaggctgacttccggctgcggagagtgtataagatggccggcaagcgcaagaccagagagtactgggacctgtataacaaggacctggataccctggtcacctactttcactaccctcacgctctggctgagcggagcctgaatattgagagaggcggcaagaacggcctgaacatcacagccctgatcgagcggatcaacgaagaggtggacgttcgctttggcgaccctggccaagaatctgaccctgccgagtactctagaagagtggtggccttctaccaggacgaccaggcttttgccgctgctctgtgtcctatcctgacctccagaaagcaagagcggaagtggcagggaaccctgacaggtggaaatcccctgggctctatggaagtcgatggcgagctgctggggagaaccagaacagatgtgctgctgctgacccggaaggatctggaaagactgtacaccaacgacggcgacctgagagattctctggctgctgcttttgctggcgcacagggcgagaaaacaaagctgggagatctgctggctgcccagggaaagaccgagttcagaacccagaaaggccggctggtgcacaaagtgacacttaaaggcggcgtgctcgacaactactacatcaagcagatcggcgcccacaatcggagcgtgctggataccaccgagtactactgcgtggaagtgtacagagacaccaagggacagaccaaagtgcggggcattcgcagagtggacgtgacccacaaggacaagaagctgtggctgacctgtccttatcctaccgactacgccgaacacctgatgtacctgttcaagaacgactacatcaccgtcgagacaaagaatggcctgcagttcgagggctactaccagtctccagccggactgaagcagaacaagttcaacggcaaagaatgcaactgcagcgtgaccgtgcctttcagaatcacaggcaccgccaccgtgaagaagctgagcatcgatatcctcggacggaaaggcggggagattagatgtggtgcccctctgagtctgctgcccgagaaatctggatcc

SEQ ID NO: 265 - RNA, 16 nt, Artificial Sequence
  OMNI RNA scaffold sequence
guuauuuugaauacua

SEQ ID NO: 266 - RNA, 15 nt, Artificial Sequence
  OMNI RNA scaffold sequence
guuauuuugaauacu

SEQ ID NO: 267 - RNA, 12 nt, Artificial Sequence
  OMNI RNA scaffold sequence
guuauuuugaau

SEQ ID NO: 268 - RNA, 10 nt, Artificial Sequence
  OMNI RNA scaffold sequence
guuauuuuga

SEQ ID NO: 269 - RNA, 15 nt, Artificial Sequence
  OMNI RNA scaffold sequence
guguauuuaaaguaa

SEQ ID NO: 270 - RNA, 14 nt, Artificial Sequence
  OMNI RNA scaffold sequence
uguauuuaaaguaa

SEQ ID NO: 271 - RNA, 11 nt, Artificial Sequence
  OMNI RNA scaffold sequence
auuuaaaguaa

SEQ ID NO: 272 - RNA, 51 nt, Artificial Sequence
  OMNI RNA scaffold sequence
auaaaaaguuaaauuuaaagauaaaaguaaauaauuaguaaauuaacuucu

SEQ ID NO: 273 - RNA, 26 nt, Artificial Sequence
  OMNI RNA scaffold sequence
gauaaugugaaauucauuuguuuuuu

SEQ ID NO: 274 - RNA, 20 nt, Artificial Sequence
  OMNI RNA scaffold sequence
gauaaugugaaauucauuug

SEQ ID NO: 275 - RNA, 112 nt, Artificial Sequence
  OMNI RNA scaffold sequence
guuauuuugaauacuagaaaguguauuuaaaguaaauaaaaaguuaaauuuaaagauaaaaguaaauaauuaguaaauuaacuucugauaaugugaaauucauuuguuuuuu

SEQ ID NO: 276 - RNA, 112 nt, Artificial Sequence
  OMNI RNA scaffold sequence
guuacuuugaauacuagaaaguguauuuaaaguaaauaaaaaguuaaauuuaaagauaaaaguaaauaauuaguaaauuaacuucugauaaugugaaauucauuuguuuuuu

SEQ ID NO: 277 - RNA, 16 nt, Artificial Sequence
  OMNI RNA scaffold sequence
guuacuuugaauacua

SEQ ID NO: 278 - RNA, 17 nt, Artificial Sequence
  OMNI RNA scaffold sequence
aagguauuaccuuaagc

SEQ ID NO: 279 - RNA, 16 nt, Artificial Sequence
  OMNI RNA scaffold sequence
gcugggguucaacucu

SEQ ID NO: 280 - RNA, 15 nt, Artificial Sequence
  OMNI RNA scaffold sequence
gcugggguucaacuc

SEQ ID NO: 281 - RNA, 12 nt, Artificial Sequence
  OMNI RNA scaffold sequence
gcugggguucaa

SEQ ID NO: 282 - RNA, 10 nt, Artificial Sequence
  OMNI RNA scaffold sequence
gcugggguuc

SEQ ID NO: 283 - RNA, 16 nt, Artificial Sequence
  OMNI RNA scaffold sequence
agaguugaaccucagu

SEQ ID NO: 284 - RNA, 16 nt, Artificial Sequence
  OMNI RNA scaffold sequence
gaguugaaccucagua

SEQ ID NO: 285 - RNA, 13 nt, Artificial Sequence
  OMNI RNA scaffold sequence
uugaaccucagua

SEQ ID NO: 286 - RNA, 11 nt, Artificial Sequence
  OMNI RNA scaffold sequence
gaaccucagua

SEQ ID NO: 287 - RNA, 33 nt, Artificial Sequence
  OMNI RNA scaffold sequence
aaacaccggcuaguuuucggugucgauugcucc

SEQ ID NO: 288 - RNA, 21 nt, Artificial Sequence
  OMNI RNA scaffold sequence
acaccggcuaguuuucggugu

SEQ ID NO: 289 - RNA, 35 nt, Artificial Sequence
  OMNI RNA scaffold sequence
aagccgguaacacaauuguuaccggcuucuuuuuu

SEQ ID NO: 290 - RNA, 29 nt, Artificial Sequence
  OMNI RNA scaffold sequence
aagccgguaacacaauuguuaccggcuuc

SEQ ID NO: 291 - RNA, 104 nt, Artificial Sequence
  OMNI RNA scaffold sequence
gcugggguucaacucugaaaagaguugaaccucaguaaacaccggcuaguuuucggugucgauugcuccaagccgguaacacaauuguuaccggcuucuuuuuu

SEQ ID NO: 292 - RNA, 104 nt, Artificial Sequence
  OMNI RNA scaffold sequence
gcugggguucaacucugaaaagaguugaaccucaguaaacaccggcuagcuuucggugucgauugcuccaagccgguaacacaauuguuaccggcuucuuuuuu

SEQ ID NO: 293 - RNA, 33 nt, Artificial Sequence
  OMNI RNA scaffold sequence
aaacaccggcuagcuuucggugucgauugcucc

SEQ ID NO: 294 - RNA, 17 nt, Artificial Sequence
  OMNI RNA scaffold sequence
gucuuggaguauuguga

SEQ ID NO: 295 - RNA, 15 nt, Artificial Sequence
  OMNI RNA scaffold sequence
gucuuggaguauugu

SEQ ID NO: 296 - RNA, 12 nt, Artificial Sequence
  OMNI RNA scaffold sequence
gucuuggaguau

SEQ ID NO: 297 - RNA, 10 nt, Artificial Sequence
  OMNI RNA scaffold sequence
gucuuggagu

SEQ ID NO: 298 - RNA, 19 nt, Artificial Sequence
  OMNI RNA scaffold sequence
ucacaacacgagucaagau

SEQ ID NO: 299 - RNA, 18 nt, Artificial Sequence
  OMNI RNA scaffold sequence
acaacacgagucaagaua

SEQ ID NO: 300 - RNA, 15 nt, Artificial Sequence
  OMNI RNA scaffold sequence
acacgagucaagaua

SEQ ID NO: 301 - RNA, 13 nt, Artificial Sequence
  OMNI RNA scaffold sequence
acgagucaagaua

SEQ ID NO: 302 - RNA, 30 nt, Artificial Sequence
  OMNI RNA scaffold sequence
aaagauuuauccuaaccgguacuuguaccu

SEQ ID NO: 303 - RNA, 20 nt, Artificial Sequence
  OMNI RNA scaffold sequence
gcccuguagggggcuuuuuu

SEQ ID NO: 304 - RNA, 14 nt, Artificial Sequence
  OMNI RNA scaffold sequence
gcccuguagggggc

SEQ ID NO: 305 - RNA, 90 nt, Artificial Sequence
  OMNI RNA scaffold sequence
gucuuggaguauugugagaaaucacaacacgagucaagauaaagauuuauccuaaccgguacuuguaccugcccuguagggggcuuuuuu

SEQ ID NO: 306 - RNA, 19 nt, Artificial Sequence
  OMNI RNA scaffold sequence
guuacaggacccuguugau

SEQ ID NO: 307 - RNA, 15 nt, Artificial Sequence
  OMNI RNA scaffold sequence
guuacaggacccugu

SEQ ID NO: 308 - RNA, 12 nt, Artificial Sequence
  OMNI RNA scaffold sequence
guuacaggaccc

SEQ ID NO: 309 - RNA, 10 nt, Artificial Sequence
  OMNI RNA scaffold sequence
guuacaggac

SEQ ID NO: 310 - RNA, 19 nt, Artificial Sequence
  OMNI RNA scaffold sequence
guuuacagguuucuguaau

SEQ ID NO: 311 - RNA, 16 nt, Artificial Sequence
  OMNI RNA scaffold sequence
acagguuucuguaaua

SEQ ID NO: 312 - RNA, 13 nt, Artificial Sequence
  OMNI RNA scaffold sequence
gguuucuguaaua

SEQ ID NO: 313 - RNA, 11 nt, Artificial Sequence
  OMNI RNA scaffold sequence
uuucuguaaua

SEQ ID NO: 314 - RNA, 19 nt, Artificial Sequence
  OMNI RNA scaffold sequence
aaggcauaaugccuuaggu

SEQ ID NO: 315 - RNA, 15 nt, Artificial Sequence
  OMNI RNA scaffold sequence
aaggcauaaugccuu

SEQ ID NO: 316 - RNA, 22 nt, Artificial Sequence
  OMNI RNA scaffold sequence
uugaucuaaccauaaagaucaa

SEQ ID NO: 317 - RNA, 22 nt, Artificial Sequence
  OMNI RNA scaffold sequence
aacagacuucggucuguuuuuu

SEQ ID NO: 318 - RNA, 16 nt, Artificial Sequence
  OMNI RNA scaffold sequence
aacagacuucggucug

SEQ ID NO: 319 - RNA, 105 nt, Artificial Sequence
  OMNI RNA scaffold sequence
guuacaggacccuguugaugaaaguuuacagguuucuguaauaaggcauaaugccuuagguuugaucuaaccauaaagaucaaaacagacuucggucuguuuuuu

SEQ ID NO: 320 - RNA, 17 nt, Artificial Sequence
  OMNI RNA scaffold sequence
guugugaauugcuucga

SEQ ID NO: 321 - RNA, 15 nt, Artificial Sequence
  OMNI RNA scaffold sequence
guuacaguagccuua

SEQ ID NO: 322 - RNA, 12 nt, Artificial Sequence
  OMNI RNA scaffold sequence
guuacaguagcc

SEQ ID NO: 323 - RNA, 10 nt, Artificial Sequence
  OMNI RNA scaffold sequence
guuacaguag

SEQ ID NO: 324 - RNA, 15 nt, Artificial Sequence
  OMNI RNA scaffold sequence
guaagcuacuguaau

SEQ ID NO: 325 - RNA, 15 nt, Artificial Sequence
  OMNI RNA scaffold sequence
uaagcuacuguaaua

SEQ ID NO: 326 - RNA, 12 nt, Artificial Sequence
  OMNI RNA scaffold sequence
gcuacuguaaua

SEQ ID NO: 327 - RNA, 11 nt, Artificial Sequence
  OMNI RNA scaffold sequence
cuacuguaaua

SEQ ID NO: 328 - RNA, 13 nt, Artificial Sequence
  OMNI RNA scaffold sequence
aagugcaaucgca

SEQ ID NO: 329 - RNA, 10 nt, Artificial Sequence
  OMNI RNA scaffold sequence
ugcaaucgca

SEQ ID NO: 330 - RNA, 30 nt, Artificial Sequence
  OMNI RNA scaffold sequence
aggcucuguucuugaacauccuuuauuaau

SEQ ID NO: 331 - RNA, 28 nt, Artificial Sequence
  OMNI RNA scaffold sequence
aacuccagccaaaggucuggaguuuuuu

SEQ ID NO: 332 - RNA, 22 nt, Artificial Sequence
  OMNI RNA scaffold sequence
aacuccagccaaaggucuggag

SEQ ID NO: 333 - RNA, 106 nt, Artificial Sequence
  OMNI RNA scaffold sequence
guuacaguagccuuacgaaaguaagcuacuguaauaagugcaaucgcaaggcucuguucuugaacauccuuuauuaauaacuccagccaaaggucuggaguuuuuu

SEQ ID NO: 334 - RNA, 15 nt, Artificial Sequence
  OMNI RNA scaffold sequence
guuauaguugaccgu

SEQ ID NO: 335 - RNA, 15 nt, Artificial Sequence
  OMNI RNA scaffold sequence
guuauaguugaccgu

SEQ ID NO: 336 - RNA, 12 nt, Artificial Sequence
  OMNI RNA scaffold sequence
guuauaguugac

SEQ ID NO: 337 - RNA, 10 nt, Artificial Sequence
  OMNI RNA scaffold sequence
guuauaguug

SEQ ID NO: 338 - RNA, 20 nt, Artificial Sequence
  OMNI RNA scaffold sequence
acggucaacacauauauaau

SEQ ID NO: 339 - RNA, 21 nt, Artificial Sequence
  OMNI RNA scaffold sequence
acggucaacacauauauaaua

SEQ ID NO: 340 - RNA, 18 nt, Artificial Sequence
  OMNI RNA scaffold sequence
gucaacacauauauaaua

SEQ ID NO: 341 - RNA, 16 nt, Artificial Sequence
  OMNI RNA scaffold sequence
caacacauauauaaua

SEQ ID NO: 342 - RNA, 17 nt, Artificial Sequence
  OMNI RNA scaffold sequence
aaggcugaaaaugccgu

SEQ ID NO: 343 - RNA, 13 nt, Artificial Sequence
  OMNI RNA scaffold sequence
ggcugaaaaugcc

SEQ ID NO: 344 - RNA, 39 nt, Artificial Sequence
  OMNI RNA scaffold sequence
aagaugagggggcgacuuuaguuacccccauuauuuuuu

SEQ ID NO: 345 - RNA, 33 nt, Artificial Sequence
  OMNI RNA scaffold sequence
aagaugagggggcgacuuuaguuacccccauua

SEQ ID NO: 346 - RNA, 95 nt, Artificial Sequence
  OMNI RNA scaffold sequence
guuauaguugaccgugaaaacggucaacacauauauaauaaggcugaaaaugccguaagaugagggggcgacuuuaguuacccccauuauuuuuu

SEQ ID NO: 347 - RNA, 16 nt, Artificial Sequence
  OMNI RNA scaffold sequence
guugcggcuagacauc

SEQ ID NO: 348 - RNA, 15 nt, Artificial Sequence
  OMNI RNA scaffold sequence
guugcggcuagacau

SEQ ID NO: 349 - RNA, 12 nt, Artificial Sequence
  OMNI RNA scaffold sequence
guugcggcuaga

SEQ ID NO: 350 - RNA, 10 nt, Artificial Sequence
  OMNI RNA scaffold sequence
guugcggcua

SEQ ID NO: 351 - RNA, 13 nt, Artificial Sequence
  OMNI RNA scaffold sequence
gaugucuagucgu

SEQ ID NO: 352 - RNA, 13 nt, Artificial Sequence
  OMNI RNA scaffold sequence
augucuagucguu

SEQ ID NO: 353 - RNA, 10 nt, Artificial Sequence
  OMNI RNA scaffold sequence
ucuagucguu

SEQ ID NO: 354 - RNA, 40 nt, Artificial Sequence
  OMNI RNA scaffold sequence
uaauaagaaccucuugcaagagaggagauuucaccauuaa

SEQ ID NO: 355 - RNA, 16 nt, Artificial Sequence
  OMNI RNA scaffold sequence
ccucuugcaagagagg

SEQ ID NO: 356 - RNA, 31 nt, Artificial Sequence
  OMNI RNA scaffold sequence
aaacggacacuucgguguccguuuauuuuuu

SEQ ID NO: 357 - RNA, 25 nt, Artificial Sequence
  OMNI RNA scaffold sequence
aaacggacacuucgguguccguuua

SEQ ID NO: 358 - RNA, 104 nt, Artificial Sequence
  OMNI RNA scaffold sequence
guugcggcuagacaucgaaagaugucuagucguuaauaagaaccucuugcaagagaggagauuucaccauuaaaaacggacacuucgguguccguuuauuuuuu

SEQ ID NO: 359 - RNA, 16 nt, Artificial Sequence
  OMNI RNA scaffold sequence
guugcggcuagacauc

SEQ ID NO: 360 - RNA, 15 nt, Artificial Sequence
  OMNI RNA scaffold sequence
guugcggcuagacau

SEQ ID NO: 361 - RNA, 12 nt, Artificial Sequence
  OMNI RNA scaffold sequence
guugcggcuaga

SEQ ID NO: 362 - RNA, 10 nt, Artificial Sequence
  OMNI RNA scaffold sequence
guugcggcua

SEQ ID NO: 363 - RNA, 13 nt, Artificial Sequence
  OMNI RNA scaffold sequence
gaugucuagucgu

SEQ ID NO: 364 - RNA, 13 nt, Artificial Sequence
  OMNI RNA scaffold sequence
augucuagucguu

SEQ ID NO: 365 - RNA, 10 nt, Artificial Sequence
  OMNI RNA scaffold sequence
ucuagucguu

SEQ ID NO: 366 - RNA, 38 nt, Artificial Sequence
  OMNI RNA scaffold sequence
uaauaagaaccuuucauacgaaaggauauuucaccaua

SEQ ID NO: 367 - RNA, 16 nt, Artificial Sequence
  OMNI RNA scaffold sequence
ccuuucauacgaaagg

SEQ ID NO: 368 - RNA, 30 nt, Artificial Sequence
  OMNI RNA scaffold sequence
aaaaaacaggcacuuuggugccuguuuuuu

SEQ ID NO: 369 - RNA, 24 nt, Artificial Sequence
  OMNI RNA scaffold sequence
aaaaaacaggcacuuuggugccug

SEQ ID NO: 370 - RNA, 101 nt, Artificial Sequence
  OMNI RNA scaffold sequence
guugcggcuagacaucgaaagaugucuagucguuaauaagaaccuuucauacgaaaggauauuucaccauaaaaaaacaggcacuuuggugccuguuuuuu

SEQ ID NO: 371 - RNA, 12 nt, Artificial Sequence
  OMNI RNA scaffold sequence
guugcgguuuga

SEQ ID NO: 372 - RNA, 15 nt, Artificial Sequence
  OMNI RNA scaffold sequence
guugcgguuugacac

SEQ ID NO: 373 - RNA, 12 nt, Artificial Sequence
  OMNI RNA scaffold sequence
guugcgguuuga

SEQ ID NO: 374 - RNA, 10 nt, Artificial Sequence
  OMNI RNA scaffold sequence
guugcgguuu

SEQ ID NO: 375 - RNA, 14 nt, Artificial Sequence
  OMNI RNA scaffold sequence
uucuuuccgcuaac

SEQ ID NO: 376 - RNA, 18 nt, Artificial Sequence
  OMNI RNA scaffold sequence
guguucuuuccgcuaaca

SEQ ID NO: 377 - RNA, 15 nt, Artificial Sequence
  OMNI RNA scaffold sequence
uucuuuccgcuaaca

SEQ ID NO: 378 - RNA, 12 nt, Artificial Sequence
  OMNI RNA scaffold sequence
uuuccgcuaaca

SEQ ID NO: 379 - RNA, 24 nt, Artificial Sequence
  OMNI RNA scaffold sequence
aagugucaaagacacacaaaauuc

SEQ ID NO: 380 - RNA, 13 nt, Artificial Sequence
  OMNI RNA scaffold sequence
gugucaaagacac

SEQ ID NO: 381 - RNA, 34 nt, Artificial Sequence
  OMNI RNA scaffold sequence
ggggguugaccgcgcgucgcccccuuucuuuuuu

SEQ ID NO: 382 - RNA, 28 nt, Artificial Sequence
  OMNI RNA scaffold sequence
ggggguugaccgcgcgucgcccccuuuc

SEQ ID NO: 383 - RNA, 88 nt, Artificial Sequence
  OMNI RNA scaffold sequence
guugcgguuugagaaauucuuuccgcuaacaagugucaaagacacacaaaauucggggguugaccgcgcgucgcccccuuucuuuuuu

SEQ ID NO: 384 - RNA, 16 nt, Artificial Sequence
  OMNI RNA scaffold sequence
guuguagauugcuuuc

SEQ ID NO: 385 - RNA, 15 nt, Artificial Sequence
  OMNI RNA scaffold sequence
guuguagauugcuuu

SEQ ID NO: 386 - RNA, 12 nt, Artificial Sequence
  OMNI RNA scaffold sequence
guuguagauugc

SEQ ID NO: 387 - RNA, 10 nt, Artificial Sequence
  OMNI RNA scaffold sequence
guuguagauu

SEQ ID NO: 388 - RNA, 16 nt, Artificial Sequence
  OMNI RNA scaffold sequence
gaaagcaaucuacaau

SEQ ID NO: 389 - RNA, 16 nt, Artificial Sequence
  OMNI RNA scaffold sequence
aaagcaaucuacaaua

SEQ ID NO: 390 - RNA, 13 nt, Artificial Sequence
  OMNI RNA scaffold sequence
gcaaucuacaaua

SEQ ID NO: 391 - RNA, 11 nt, Artificial Sequence
  OMNI RNA scaffold sequence
aaucuacaaua

SEQ ID NO: 392 - RNA, 45 nt, Artificial Sequence
  OMNI RNA scaffold sequence
aaagaaauacucuguggggcucuguuggcaacaacauccucuauu

SEQ ID NO: 393 - RNA, 21 nt, Artificial Sequence
  OMNI RNA scaffold sequence
gcccgcuugucgggcuuuuuu

SEQ ID NO: 394 - RNA, 15 nt, Artificial Sequence
  OMNI RNA scaffold sequence
gcccgcuugucgggc

SEQ ID NO: 395 - RNA, 102 nt, Artificial Sequence
  OMNI RNA scaffold sequence
guuguagauugcuuucgaaagaaagcaaucuacaauaaagaaauacucuguggggcucuguuggcaacaacauccucuauugcccgcuugucgggcuuuuuu

SEQ ID NO: 396 - RNA, 16 nt, Artificial Sequence
  OMNI RNA scaffold sequence
guugugaauagcucuc

SEQ ID NO: 397 - RNA, 15 nt, Artificial Sequence
  OMNI RNA scaffold sequence
guugugaauagcucu

SEQ ID NO: 398 - RNA, 12 nt, Artificial Sequence
  OMNI RNA scaffold sequence
guugugaauagc

SEQ ID NO: 399 - RNA, 10 nt, Artificial Sequence
  OMNI RNA scaffold sequence
guugugaaua

SEQ ID NO: 400 - RNA, 15 nt, Artificial Sequence
  OMNI RNA scaffold sequence
gaagcuauucacaau

SEQ ID NO: 401 - RNA, 15 nt, Artificial Sequence
  OMNI RNA scaffold sequence
aagcuauucacaaua

SEQ ID NO: 402 - RNA, 13 nt, Artificial Sequence
  OMNI RNA scaffold sequence
gcuauucacaaua

SEQ ID NO: 403 - RNA, 11 nt, Artificial Sequence
  OMNI RNA scaffold sequence
uauucacaaua

SEQ ID NO: 404 - RNA, 14 nt, Artificial Sequence
  OMNI RNA scaffold sequence
aaggauuauuccgu

SEQ ID NO: 405 - RNA, 10 nt, Artificial Sequence
  OMNI RNA scaffold sequence
ggauuauucc

SEQ ID NO: 406 - RNA, 12 nt, Artificial Sequence
  OMNI RNA scaffold sequence
ugugaaaacauu

SEQ ID NO: 407 - RNA, 38 nt, Artificial Sequence
  OMNI RNA scaffold sequence
agguugguccaucguccuacaacgguggacaauuuuuu

SEQ ID NO: 408 - RNA, 32 nt, Artificial Sequence
  OMNI RNA scaffold sequence
agguugguccaucguccuacaacgguggacaa

SEQ ID NO: 409 - RNA, 99 nt, Artificial Sequence
  OMNI RNA scaffold sequence
guugugaauagcucucgaaagaagcuauucacaauaaggauuauuccguugugaaaacauuagguugguccaucguccuacaacgguggacaauuuuuu

SEQ ID NO: 410 - RNA, 16 nt, Artificial Sequence
  OMNI RNA scaffold sequence
guugugaauagcuuuc

SEQ ID NO: 411 - RNA, 15 nt, Artificial Sequence
  OMNI RNA scaffold sequence
guugugaauagcuuu

SEQ ID NO: 412 - RNA, 12 nt, Artificial Sequence
  OMNI RNA scaffold sequence
guugugaauagc

SEQ ID NO: 413 - RNA, 10 nt, Artificial Sequence
  OMNI RNA scaffold sequence
guugugaaua

SEQ ID NO: 414 - RNA, 15 nt, Artificial Sequence
  OMNI RNA scaffold sequence
aaagcuauucacaau

SEQ ID NO: 415 - RNA, 16 nt, Artificial Sequence
  OMNI RNA scaffold sequence
aaagcuauucacaaua

SEQ ID NO: 416 - RNA, 13 nt, Artificial Sequence
  OMNI RNA scaffold sequence
gcuauucacaaua

SEQ ID NO: 417 - RNA, 11 nt, Artificial Sequence
  OMNI RNA scaffold sequence
uauucacaaua

SEQ ID NO: 418 - RNA, 14 nt, Artificial Sequence
  OMNI RNA scaffold sequence
aaggauuauuccgu

SEQ ID NO: 419 - RNA, 10 nt, Artificial Sequence
  OMNI RNA scaffold sequence
ggauuauucc

SEQ ID NO: 420 - RNA, 14 nt, Artificial Sequence
  OMNI RNA scaffold sequence
uguguaaacauucc

SEQ ID NO: 421 - RNA, 30 nt, Artificial Sequence
  OMNI RNA scaffold sequence
gaguggggcagcaaugucucgcucuuuuuu

SEQ ID NO: 422 - RNA, 24 nt, Artificial Sequence
  OMNI RNA scaffold sequence
gaguggggcagcaaugucucgcuc

SEQ ID NO: 423 - RNA, 93 nt, Artificial Sequence
  OMNI RNA scaffold sequence
guugugaauagcuuucgaaaaaagcuauucacaauaaggauuauuccguuguguaaacauuccgaguggggcagcaaugucucgcucuuuuuu

SEQ ID NO: 424 - RNA, 19 nt, Artificial Sequence
  OMNI RNA scaffold sequence
guugugaauugcuaaaaau

SEQ ID NO: 425 - RNA, 15 nt, Artificial Sequence
  OMNI RNA scaffold sequence
guugugaauugcuaa

SEQ ID NO: 426 - RNA, 12 nt, Artificial Sequence
  OMNI RNA scaffold sequence
guugugaauugc

SEQ ID NO: 427 - RNA, 10 nt, Artificial Sequence
  OMNI RNA scaffold sequence
guugugaauu

SEQ ID NO: 428 - RNA, 20 nt, Artificial Sequence
  OMNI RNA scaffold sequence
agugaaagacuuuucacaac

SEQ ID NO: 429 - RNA, 17 nt, Artificial Sequence
  OMNI RNA scaffold sequence
aaagacuuuucacaaca

SEQ ID NO: 430 - RNA, 14 nt, Artificial Sequence
  OMNI RNA scaffold sequence
gacuuuucacaaca

SEQ ID NO: 431 - RNA, 11 nt, Artificial Sequence
  OMNI RNA scaffold sequence
uuuucacaaca

SEQ ID NO: 432 - RNA, 24 nt, Artificial Sequence
  OMNI RNA scaffold sequence
aaggcuauaagccgaagacuucuu

SEQ ID NO: 433 - RNA, 11 nt, Artificial Sequence
  OMNI RNA scaffold sequence
ggcuauaagcc

SEQ ID NO: 434 - RNA, 28 nt, Artificial Sequence
  OMNI RNA scaffold sequence
acuccugcguacuccguaggaguuuuuu

SEQ ID NO: 435 - RNA, 22 nt, Artificial Sequence
  OMNI RNA scaffold sequence
acuccugcguacuccguaggag

SEQ ID NO: 436 - RNA, 95 nt, Artificial Sequence
  OMNI RNA scaffold sequence
guugugaauugcuaaaaaugaaaagugaaagacuuuucacaacaaggcuauaagccgaagacuucuuacuccugcguacuccguaggaguuuuuu

SEQ ID NO: 437 - RNA, 90 nt, Artificial Sequence
  OMNI RNA scaffold sequence
gcuugauaguauuguaagaaauuacaauacgaguucaaguaaacuuuaguccaaaugagcucgugcucgccugcguuggcaggcuuuuuu

SEQ ID NO: 438 - RNA, 17 nt, Artificial Sequence
  OMNI RNA scaffold sequence
gcuugauaguauuguaa

SEQ ID NO: 439 - RNA, 19 nt, Artificial Sequence
  OMNI RNA scaffold sequence
uuacaauacgaguucaagu

SEQ ID NO: 440 - RNA, 28 nt, Artificial Sequence
  OMNI RNA scaffold sequence
aaacuuuaguccaaaugagcucgugcuc

SEQ ID NO: 441 - RNA, 22 nt, Artificial Sequence
  OMNI RNA scaffold sequence
gccugcguuggcaggcuuuuuu

SEQ ID NO: 442 - RNA, 16 nt, Artificial Sequence
  OMNI RNA scaffold sequence
gccugcguuggcaggc

SEQ ID NO: 443 - RNA, 16 nt, Artificial Sequence
  OMNI RNA scaffold sequence
guugugaauugcuucg

SEQ ID NO: 444 - RNA, 15 nt, Artificial Sequence
  OMNI RNA scaffold sequence
guugugaauugcuuc

SEQ ID NO: 445 - RNA, 12 nt, Artificial Sequence
  OMNI RNA scaffold sequence
guugugaauugc

SEQ ID NO: 446 - RNA, 10 nt, Artificial Sequence
  OMNI RNA scaffold sequence
guugugaauu

SEQ ID NO: 447 - RNA, 17 nt, Artificial Sequence
  OMNI RNA scaffold sequence
cgaaagcaauucacaau

SEQ ID NO: 448 - RNA, 17 nt, Artificial Sequence
  OMNI RNA scaffold sequence
gaaagcaauucacaaua

SEQ ID NO: 449 - RNA, 13 nt, Artificial Sequence
  OMNI RNA scaffold sequence
gcaauucacaaua

SEQ ID NO: 450 - RNA, 11 nt, Artificial Sequence
  OMNI RNA scaffold sequence
aauucacaaua

SEQ ID NO: 451 - RNA, 14 nt, Artificial Sequence
  OMNI RNA scaffold sequence
aaggauuauuccgu

SEQ ID NO: 452 - RNA, 10 nt, Artificial Sequence
  OMNI RNA scaffold sequence
ggauuauucc

SEQ ID NO: 453 - RNA, 18 nt, Artificial Sequence
  OMNI RNA scaffold sequence
ugugaaaacauuagguua

SEQ ID NO: 454 - RNA, 31 nt, Artificial Sequence
  OMNI RNA scaffold sequence
gcccaucguccuucaacggugggcauuuuuu

SEQ ID NO: 455 - RNA, 25 nt, Artificial Sequence
  OMNI RNA scaffold sequence
gcccaucguccuucaacggugggca

SEQ ID NO: 456 - RNA, 100 nt, Artificial Sequence
  OMNI RNA scaffold sequence
guugugaauugcuucggaaacgaaagcaauucacaauaaggauuauuccguugugaaaacauuagguuagcccaucguccuucaacggugggcauuuuuu

SEQ ID NO: 457 - RNA, 102 nt, Artificial Sequence
  OMNI RNA scaffold sequence
guugugaauugcuucgagaaaucgaaagcaauucacaauaaggauuauuccguugugaaaacauuagguuagcccaucguccuucaacggugggcauuuuuu

SEQ ID NO: 458 - RNA, 17 nt, Artificial Sequence
  OMNI RNA scaffold sequence
guugugaauugcuucga

SEQ ID NO: 459 - RNA, 18 nt, Artificial Sequence
  OMNI RNA scaffold sequence
ucgaaagcaauucacaau

SEQ ID NO: 460 - RNA, 16 nt, Artificial Sequence
  OMNI RNA scaffold sequence
guugugaauugcuuga

SEQ ID NO: 461 - RNA, 15 nt, Artificial Sequence
  OMNI RNA scaffold sequence
guugugaauugcuug

SEQ ID NO: 462 - RNA, 12 nt, Artificial Sequence
  OMNI RNA scaffold sequence
guugugaauugc

SEQ ID NO: 463 - RNA, 10 nt, Artificial Sequence
  OMNI RNA scaffold sequence
guugugaauu

SEQ ID NO: 464 - RNA, 16 nt, Artificial Sequence
  OMNI RNA scaffold sequence
ucaagcaauucacaau

SEQ ID NO: 465 - RNA, 16 nt, Artificial Sequence
  OMNI RNA scaffold sequence
caagcaauucacaaua

SEQ ID NO: 466 - RNA, 13 nt, Artificial Sequence
  OMNI RNA scaffold sequence
gcaauucacaaua

SEQ ID NO: 467 - RNA, 11 nt, Artificial Sequence
  OMNI RNA scaffold sequence
aauucacaaua

SEQ ID NO: 468 - RNA, 12 nt, Artificial Sequence
  OMNI RNA scaffold sequence
aaggauuauucc

SEQ ID NO: 469 - RNA, 10 nt, Artificial Sequence
  OMNI RNA scaffold sequence
ggauuauucc

SEQ ID NO: 470 - RNA, 15 nt, Artificial Sequence
  OMNI RNA scaffold sequence
guugugaaaacuacu

SEQ ID NO: 471 - RNA, 37 nt, Artificial Sequence
  OMNI RNA scaffold sequence
gagggggcggaagauaucuucuuccgucgccuuuuuu

SEQ ID NO: 472 - RNA, 31 nt, Artificial Sequence
  OMNI RNA scaffold sequence
gagggggcggaagauaucuucuuccgucgcc

SEQ ID NO: 473 - RNA, 100 nt, Artificial Sequence
  OMNI RNA scaffold sequence
guugugaauugcuugagaaaucaagcaauucacaauaaggauuauuccguugugaaaacuacugagggggcggaagauaucuucuuccgucgccuuuuuu

SEQ ID NO: 474 - RNA, 16 nt, Artificial Sequence
  OMNI RNA scaffold sequence
guugugaauugcuuuc

SEQ ID NO: 475 - RNA, 15 nt, Artificial Sequence
  OMNI RNA scaffold sequence
guugugaauugcuuu

SEQ ID NO: 476 - RNA, 12 nt, Artificial Sequence
  OMNI RNA scaffold sequence
guugugaauugc

SEQ ID NO: 477 - RNA, 10 nt, Artificial Sequence
  OMNI RNA scaffold sequence
guugugaauu

SEQ ID NO: 478 - RNA, 16 nt, Artificial Sequence
  OMNI RNA scaffold sequence
gaaagcaauucacaau

SEQ ID NO: 479 - RNA, 16 nt, Artificial Sequence
  OMNI RNA scaffold sequence
aaagcaauucacaaua

SEQ ID NO: 480 - RNA, 13 nt, Artificial Sequence
  OMNI RNA scaffold sequence
gcaauucacaaua

SEQ ID NO: 481 - RNA, 11 nt, Artificial Sequence
  OMNI RNA scaffold sequence
aauucacaaua

SEQ ID NO: 482 - RNA, 14 nt, Artificial Sequence
  OMNI RNA scaffold sequence
aaggauuauuccgu

SEQ ID NO: 483 - RNA, 10 nt, Artificial Sequence
  OMNI RNA scaffold sequence
ggauuauucc

SEQ ID NO: 484 - RNA, 13 nt, Artificial Sequence
  OMNI RNA scaffold sequence
ugugaaaacauuu

SEQ ID NO: 485 - RNA, 35 nt, Artificial Sequence
  OMNI RNA scaffold sequence
ggagcggggauagcgauauccucgcuuucuuuuuu

SEQ ID NO: 486 - RNA, 29 nt, Artificial Sequence
  OMNI RNA scaffold sequence
ggagcggggauagcgauauccucgcuuuc

SEQ ID NO: 487 - RNA, 98 nt, Artificial Sequence
  OMNI RNA scaffold sequence
guugugaauugcuuucgaaagaaagcaauucacaauaaggauuauuccguugugaaaacauuuggagcggggauagcgauauccucgcuuucuuuuuu

SEQ ID NO: 488 - RNA, 16 nt, Artificial Sequence
  OMNI RNA scaffold sequence
guugugaauugcuuuc

SEQ ID NO: 489 - RNA, 15 nt, Artificial Sequence
  OMNI RNA scaffold sequence
guugugaauugcuuu

SEQ ID NO: 490 - RNA, 12 nt, Artificial Sequence
  OMNI RNA scaffold sequence
guugugaauugc

SEQ ID NO: 491 - RNA, 10 nt, Artificial Sequence
  OMNI RNA scaffold sequence
guugugaauu

SEQ ID NO: 492 - RNA, 15 nt, Artificial Sequence
  OMNI RNA scaffold sequence
gaagcaauucacaau

SEQ ID NO: 493 - RNA, 15 nt, Artificial Sequence
  OMNI RNA scaffold sequence
aagcaauucacaaua

SEQ ID NO: 494 - RNA, 13 nt, Artificial Sequence
  OMNI RNA scaffold sequence
gcaauucacaaua

SEQ ID NO: 495 - RNA, 11 nt, Artificial Sequence
  OMNI RNA scaffold sequence
aauucacaaua

SEQ ID NO: 496 - RNA, 14 nt, Artificial Sequence
  OMNI RNA scaffold sequence
aaggauuauuccgu

SEQ ID NO: 497 - RNA, 10 nt, Artificial Sequence
  OMNI RNA scaffold sequence
ggauuauucc

SEQ ID NO: 498 - RNA, 18 nt, Artificial Sequence
  OMNI RNA scaffold sequence
ugugaaaacauuaaggcc

SEQ ID NO: 499 - RNA, 29 nt, Artificial Sequence
  OMNI RNA scaffold sequence
gcccucguccucaacgggggcucuuuuuu

SEQ ID NO: 500 - RNA, 23 nt, Artificial Sequence
  OMNI RNA scaffold sequence
gcccucguccucaacgggggcuc

SEQ ID NO: 501 - RNA, 96 nt, Artificial Sequence
  OMNI RNA scaffold sequence
guugugaauugcuuucgaaagaagcaauucacaauaaggauuauuccguugugaaaacauuaaggccgcccucguccucaacgggggcucuuuuuu

SEQ ID NO: 502 - RNA, 16 nt, Artificial Sequence
  OMNI RNA scaffold sequence
guugugaauugcuuuc

SEQ ID NO: 503 - RNA, 15 nt, Artificial Sequence
  OMNI RNA scaffold sequence
guugugaauugcuuu

SEQ ID NO: 504 - RNA, 12 nt, Artificial Sequence
  OMNI RNA scaffold sequence
guugugaauugc

SEQ ID NO: 505 - RNA, 10 nt, Artificial Sequence
  OMNI RNA scaffold sequence
guugugaauu

SEQ ID NO: 506 - RNA, 15 nt, Artificial Sequence
  OMNI RNA scaffold sequence
gaagcaauucacaau

SEQ ID NO: 507 - RNA, 15 nt, Artificial Sequence
  OMNI RNA scaffold sequence
aagcaauucacaaua

SEQ ID NO: 508 - RNA, 13 nt, Artificial Sequence
  OMNI RNA scaffold sequence
gcaauucacaaua

SEQ ID NO: 509 - RNA, 11 nt, Artificial Sequence
  OMNI RNA scaffold sequence
aauucacaaua

SEQ ID NO: 510 - RNA, 14 nt, Artificial Sequence
  OMNI RNA scaffold sequence
aaggauuauuccgu

SEQ ID NO: 511 - RNA, 12 nt, Artificial Sequence
  OMNI RNA scaffold sequence
ggauuauuccgu

SEQ ID NO: 512 - RNA, 18 nt, Artificial Sequence
  OMNI RNA scaffold sequence
ugugaaaacaucaagguu

SEQ ID NO: 513 - RNA, 27 nt, Artificial Sequence
  OMNI RNA scaffold sequence
gcccucguccuuaacgggggcuuuuuu

SEQ ID NO: 514 - RNA, 21 nt, Artificial Sequence
  OMNI RNA scaffold sequence
gcccucguccuuaacgggggc

SEQ ID NO: 515 - RNA, 94 nt, Artificial Sequence
  OMNI RNA scaffold sequence
guugugaauugcuuucgaaagaagcaauucacaauaaggauuauuccguugugaaaacaucaagguugcccucguccuuaacgggggcuuuuuu

SEQ ID NO: 516 - RNA, 19 nt, Artificial Sequence
  OMNI RNA scaffold sequence
guugugaauugcuuucaaa

SEQ ID NO: 517 - RNA, 15 nt, Artificial Sequence
  OMNI RNA scaffold sequence
guugugaauugcuuu

SEQ ID NO: 518 - RNA, 12 nt, Artificial Sequence
  OMNI RNA scaffold sequence
guugugaauugc

SEQ ID NO: 519 - RNA, 10 nt, Artificial Sequence
  OMNI RNA scaffold sequence
guugugaauu

SEQ ID NO: 520 - RNA, 19 nt, Artificial Sequence
  OMNI RNA scaffold sequence
ugugaaagcuuuucacaau

SEQ ID NO: 521 - RNA, 16 nt, Artificial Sequence
  OMNI RNA scaffold sequence
aaagcuuuucacaaua

SEQ ID NO: 522 - RNA, 13 nt, Artificial Sequence
  OMNI RNA scaffold sequence
gcuuuucacaaua

SEQ ID NO: 523 - RNA, 11 nt, Artificial Sequence
  OMNI RNA scaffold sequence
uuuucacaaua

SEQ ID NO: 524 - RNA, 15 nt, Artificial Sequence
  OMNI RNA scaffold sequence
aaggcuauaagccac

SEQ ID NO: 525 - RNA, 11 nt, Artificial Sequence
  OMNI RNA scaffold sequence
ggcuauaagcc

SEQ ID NO: 526 - RNA, 11 nt, Artificial Sequence
  OMNI RNA scaffold sequence
agaucuuucua

SEQ ID NO: 527 - RNA, 30 nt, Artificial Sequence
  OMNI RNA scaffold sequence
acuccugcguacuccgugggaguauuuuuu

SEQ ID NO: 528 - RNA, 24 nt, Artificial Sequence
  OMNI RNA scaffold sequence
acuccugcguacuccgugggagua

SEQ ID NO: 529 - RNA, 98 nt, Artificial Sequence
  OMNI RNA scaffold sequence
guugugaauugcuuucaaagaaaugugaaagcuuuucacaauaaggcuauaagccacagaucuuucuaacuccugcguacuccgugggaguauuuuuu

SEQ ID NO: 530 - RNA, 98 nt, Artificial Sequence
  OMNI RNA scaffold sequence
guugugaauugcuuucaaagaaaugugaaagcucuucacaauaaggcuauaagccacagaucuuucuaacuccugcguacuccgugggaguauuuuuu

SEQ ID NO: 531 - RNA, 19 nt, Artificial Sequence
  OMNI RNA scaffold sequence
ugugaaagcucuucacaau

SEQ ID NO: 532 - RNA, 19 nt, Artificial Sequence
  OMNI RNA scaffold sequence
guugugaauugcuuucaaa

SEQ ID NO: 533 - RNA, 15 nt, Artificial Sequence
  OMNI RNA scaffold sequence
guugugaauugcuuu

SEQ ID NO: 534 - RNA, 12 nt, Artificial Sequence
  OMNI RNA scaffold sequence
guugugaauugc

SEQ ID NO: 535 - RNA, 10 nt, Artificial Sequence
  OMNI RNA scaffold sequence
guugugaauu

SEQ ID NO: 536 - RNA, 19 nt, Artificial Sequence
  OMNI RNA scaffold sequence
ugugaaagcuuuucacaau

SEQ ID NO: 537 - RNA, 16 nt, Artificial Sequence
  OMNI RNA scaffold sequence
aaagcuuuucacaaua

SEQ ID NO: 538 - RNA, 13 nt, Artificial Sequence
  OMNI RNA scaffold sequence
gcuuuucacaaua

SEQ ID NO: 539 - RNA, 11 nt, Artificial Sequence
  OMNI RNA scaffold sequence
uuuucacaaua

SEQ ID NO: 540 - RNA, 13 nt, Artificial Sequence
  OMNI RNA scaffold sequence
aaggcuauaagcc

SEQ ID NO: 541 - RNA, 11 nt, Artificial Sequence
  OMNI RNA scaffold sequence
ggcuauaagcc

SEQ ID NO: 542 - RNA, 45 nt, Artificial Sequence
  OMNI RNA scaffold sequence
gaagauuuucuaucucccgcguacuuuccgugggagaaauuuuuu

SEQ ID NO: 543 - RNA, 39 nt, Artificial Sequence
  OMNI RNA scaffold sequence
gaagauuuucuaucucccgcguacuuuccgugggagaaa

SEQ ID NO: 544 - RNA, 100 nt, Artificial Sequence
  OMNI RNA scaffold sequence
guugugaauugcuuucaaagaaaugugaaagcuuuucacaauaaggcuauaagccgaagauuuucuaucucccgcguacuuuccgugggagaaauuuuuu

SEQ ID NO: 545 - RNA, 100 nt, Artificial Sequence
  OMNI RNA scaffold sequence
guugugaauugcuuucaaagaaaugugaaagcucuucacaauaaggcuauaagccgaagauucucuaucucccgcguacuuuccgugggagaaauuuuuu

SEQ ID NO: 546 - RNA, 19 nt, Artificial Sequence
  OMNI RNA scaffold sequence
ugugaaagcucuucacaau

SEQ ID NO: 547 - RNA, 16 nt, Artificial Sequence
  OMNI RNA scaffold sequence
guugugaauugcuuuc

SEQ ID NO: 548 - RNA, 15 nt, Artificial Sequence
  OMNI RNA scaffold sequence
guugugaauugcuuu

SEQ ID NO: 549 - RNA, 12 nt, Artificial Sequence
  OMNI RNA scaffold sequence
guugugaauugc

SEQ ID NO: 550 - RNA, 10 nt, Artificial Sequence
  OMNI RNA scaffold sequence
guugugaauu

SEQ ID NO: 551 - RNA, 16 nt, Artificial Sequence
  OMNI RNA scaffold sequence
gaaagcaauucacaau

SEQ ID NO: 552 - RNA, 16 nt, Artificial Sequence
  OMNI RNA scaffold sequence
aaagcaauucacaaua

SEQ ID NO: 553 - RNA, 13 nt, Artificial Sequence
  OMNI RNA scaffold sequence
gcaauucacaaua

SEQ ID NO: 554 - RNA, 11 nt, Artificial Sequence
  OMNI RNA scaffold sequence
aauucacaaua

SEQ ID NO: 555 - RNA, 12 nt, Artificial Sequence
  OMNI RNA scaffold sequence
aaggauuauucc

SEQ ID NO: 556 - RNA, 10 nt, Artificial Sequence
  OMNI RNA scaffold sequence
ggauuauucc

SEQ ID NO: 557 - RNA, 22 nt, Artificial Sequence
  OMNI RNA scaffold sequence
guugugaaaacucuuagguucu

SEQ ID NO: 558 - RNA, 31 nt, Artificial Sequence
  OMNI RNA scaffold sequence
agucugucguccuuuaucggcagacuuuuuu

SEQ ID NO: 559 - RNA, 25 nt, Artificial Sequence
  OMNI RNA scaffold sequence
agucugucguccuuuaucggcagac

SEQ ID NO: 560 - RNA, 101 nt, Artificial Sequence
  OMNI RNA scaffold sequence
guugugaauugcuuucgaaagaaagcaauucacaauaaggauuauuccguugugaaaacucuuagguucuagucugucguccuuuaucggcagacuuuuuu

SEQ ID NO: 561 - RNA, 17 nt, Artificial Sequence
  OMNI RNA scaffold sequence
guugugaauugcuuuca

SEQ ID NO: 562 - RNA, 15 nt, Artificial Sequence
  OMNI RNA scaffold sequence
guugugaauugcuuu

SEQ ID NO: 563 - RNA, 12 nt, Artificial Sequence
  OMNI RNA scaffold sequence
guugugaauugc

SEQ ID NO: 564 - RNA, 10 nt, Artificial Sequence
  OMNI RNA scaffold sequence
guugugaauu

SEQ ID NO: 565 - RNA, 16 nt, Artificial Sequence
  OMNI RNA scaffold sequence
ugaagcaauucacaau

SEQ ID NO: 566 - RNA, 15 nt, Artificial Sequence
  OMNI RNA scaffold sequence
aagcaauucacaaua

SEQ ID NO: 567 - RNA, 13 nt, Artificial Sequence
  OMNI RNA scaffold sequence
gcaauucacaaua

SEQ ID NO: 568 - RNA, 11 nt, Artificial Sequence
  OMNI RNA scaffold sequence
aauucacaaua

SEQ ID NO: 569 - RNA, 17 nt, Artificial Sequence
  OMNI RNA scaffold sequence
aaggauuauuccguugu

SEQ ID NO: 570 - RNA, 10 nt, Artificial Sequence
  OMNI RNA scaffold sequence
ggauuauucc

SEQ ID NO: 571 - RNA, 46 nt, Artificial Sequence
  OMNI RNA scaffold sequence
gaaaacauuaaaagcggcacucuuucgggugucgcuuucguuuuuu

SEQ ID NO: 572 - RNA, 40 nt, Artificial Sequence
  OMNI RNA scaffold sequence
gaaaacauuaaaagcggcacucuuucgggugucgcuuucg

SEQ ID NO: 573 - RNA, 100 nt, Artificial Sequence
  OMNI RNA scaffold sequence
guugugaauugcuuucagaaaugaagcaauucacaauaaggauuauuccguugugaaaacauuaaaagcggcacucuuucgggugucgcuuucguuuuuu

SEQ ID NO: 574 - RNA, 98 nt, Artificial Sequence
  OMNI RNA scaffold sequence
guugugaauugcuuucgaaagaagcaauucacaauaaggauuauuccguugugaaaacauuaaaagcggcacucuuucgggugucgcuuucguuuuuu

SEQ ID NO: 575 - RNA, 16 nt, Artificial Sequence
  OMNI RNA scaffold sequence
guugugaauugcuuuc

SEQ ID NO: 576 - RNA, 15 nt, Artificial Sequence
  OMNI RNA scaffold sequence
gaagcaauucacaau

SEQ ID NO: 577 - RNA, 16 nt, Artificial Sequence
  OMNI RNA scaffold sequence
guugugaauugcuuuc

SEQ ID NO: 578 - RNA, 15 nt, Artificial Sequence
  OMNI RNA scaffold sequence
guugugaauugcuuu

SEQ ID NO: 579 - RNA, 12 nt, Artificial Sequence
  OMNI RNA scaffold sequence
guugugaauugc

SEQ ID NO: 580 - RNA, 10 nt, Artificial Sequence
  OMNI RNA scaffold sequence
guugugaauu

SEQ ID NO: 581 - RNA, 15 nt, Artificial Sequence
  OMNI RNA scaffold sequence
gaagcaauucacaau

SEQ ID NO: 582 - RNA, 15 nt, Artificial Sequence
  OMNI RNA scaffold sequence
aagcaauucacaaua

SEQ ID NO: 583 - RNA, 13 nt, Artificial Sequence
  OMNI RNA scaffold sequence
gcaauucacaaua

SEQ ID NO: 584 - RNA, 11 nt, Artificial Sequence
  OMNI RNA scaffold sequence
aauucacaaua

SEQ ID NO: 585 - RNA, 14 nt, Artificial Sequence
  OMNI RNA scaffold sequence
aaggauuauuccgu

SEQ ID NO: 586 - RNA, 10 nt, Artificial Sequence
  OMNI RNA scaffold sequence
ggauuauucc

SEQ ID NO: 587 - RNA, 17 nt, Artificial Sequence
  OMNI RNA scaffold sequence
ugugaaaacauuagguu

SEQ ID NO: 588 - RNA, 27 nt, Artificial Sequence
  OMNI RNA scaffold sequence
gccaucguccuuaacgguggcuuuuuu

SEQ ID NO: 589 - RNA, 21 nt, Artificial Sequence
  OMNI RNA scaffold sequence
gccaucguccuuaacgguggc

SEQ ID NO: 590 - RNA, 93 nt, Artificial Sequence
  OMNI RNA scaffold sequence
guugugaauugcuuucgaaagaagcaauucacaauaaggauuauuccguugugaaaacauuagguugccaucguccuuaacgguggcuuuuuu

SEQ ID NO: 591 - RNA, 16 nt, Artificial Sequence
  OMNI RNA scaffold sequence
guugugaauugcuuuc

SEQ ID NO: 592 - RNA, 15 nt, Artificial Sequence
  OMNI RNA scaffold sequence
guugugaauugcuuu

SEQ ID NO: 593 - RNA, 12 nt, Artificial Sequence
  OMNI RNA scaffold sequence
guugugaauugc

SEQ ID NO: 594 - RNA, 10 nt, Artificial Sequence
  OMNI RNA scaffold sequence
guugugaauu

SEQ ID NO: 595 - RNA, 15 nt, Artificial Sequence
  OMNI RNA scaffold sequence
gaagcaauucacaau

SEQ ID NO: 596 - RNA, 16 nt, Artificial Sequence
  OMNI RNA scaffold sequence
gaagcaauucacaaua

SEQ ID NO: 597 - RNA, 13 nt, Artificial Sequence
  OMNI RNA scaffold sequence
gcaauucacaaua

SEQ ID NO: 598 - RNA, 11 nt, Artificial Sequence
  OMNI RNA scaffold sequence
aauucacaaua

SEQ ID NO: 599 - RNA, 14 nt, Artificial Sequence
  OMNI RNA scaffold sequence
aaggauuauuccgu

SEQ ID NO: 600 - RNA, 10 nt, Artificial Sequence
  OMNI RNA scaffold sequence
ggauuauucc

SEQ ID NO: 601 - RNA, 13 nt, Artificial Sequence
  OMNI RNA scaffold sequence
uguguaaacauuu

SEQ ID NO: 602 - RNA, 29 nt, Artificial Sequence
  OMNI RNA scaffold sequence
agagcggaucggaagauucgcucuuuuuu

SEQ ID NO: 603 - RNA, 23 nt, Artificial Sequence
  OMNI RNA scaffold sequence
agagcggaucggaagauucgcuc

SEQ ID NO: 604 - RNA, 91 nt, Artificial Sequence
  OMNI RNA scaffold sequence
guugugaauugcuuucgaaagaagcaauucacaauaaggauuauuccguuguguaaacauuuagagcggaucggaagauucgcucuuuuuu

SEQ ID NO: 605 - RNA, 16 nt, Artificial Sequence
  OMNI RNA scaffold sequence
guugugaauugcuuuc

SEQ ID NO: 606 - RNA, 15 nt, Artificial Sequence
  OMNI RNA scaffold sequence
guugugaauugcuuu

SEQ ID NO: 607 - RNA, 12 nt, Artificial Sequence
  OMNI RNA scaffold sequence
guugugaauugc

SEQ ID NO: 608 - RNA, 10 nt, Artificial Sequence
  OMNI RNA scaffold sequence
guugugaauu

SEQ ID NO: 609 - RNA, 15 nt, Artificial Sequence
  OMNI RNA scaffold sequence
gaagcaauucacaau

SEQ ID NO: 610 - RNA, 16 nt, Artificial Sequence
  OMNI RNA scaffold sequence
gaagcaauucacaaua

SEQ ID NO: 611 - RNA, 13 nt, Artificial Sequence
  OMNI RNA scaffold sequence
gcaauucacaaua

SEQ ID NO: 612 - RNA, 11 nt, Artificial Sequence
  OMNI RNA scaffold sequence
aauucacaaua

SEQ ID NO: 613 - RNA, 14 nt, Artificial Sequence
  OMNI RNA scaffold sequence
aaggauuauuccgu

SEQ ID NO: 614 - RNA, 10 nt, Artificial Sequence
  OMNI RNA scaffold sequence
ggauuauucc

SEQ ID NO: 615 - RNA, 13 nt, Artificial Sequence
  OMNI RNA scaffold sequence
ugugcaaacauuu

SEQ ID NO: 616 - RNA, 29 nt, Artificial Sequence
  OMNI RNA scaffold sequence
agagcggaucgcaugauucgcucuuuuuu

SEQ ID NO: 617 - RNA, 23 nt, Artificial Sequence
  OMNI RNA scaffold sequence
agagcggaucgcaugauucgcuc

SEQ ID NO: 618 - RNA, 91 nt, Artificial Sequence
  OMNI RNA scaffold sequence
guugugaauugcuuucgaaagaagcaauucacaauaaggauuauuccguugugcaaacauuuagagcggaucgcaugauucgcucuuuuuu

SEQ ID NO: 619 - RNA, 16 nt, Artificial Sequence
  OMNI RNA scaffold sequence
guugugaguugcuuuc

SEQ ID NO: 620 - RNA, 15 nt, Artificial Sequence
  OMNI RNA scaffold sequence
guugugaguugcuuu

SEQ ID NO: 621 - RNA, 12 nt, Artificial Sequence
  OMNI RNA scaffold sequence
guugugaguugc

SEQ ID NO: 622 - RNA, 10 nt, Artificial Sequence
  OMNI RNA scaffold sequence
guugugaguu

SEQ ID NO: 623 - RNA, 15 nt, Artificial Sequence
  OMNI RNA scaffold sequence
gaagcaacucacaau

SEQ ID NO: 624 - RNA, 15 nt, Artificial Sequence
  OMNI RNA scaffold sequence
aagcaacucacaaua

SEQ ID NO: 625 - RNA, 13 nt, Artificial Sequence
  OMNI RNA scaffold sequence
gcaacucacaaua

SEQ ID NO: 626 - RNA, 11 nt, Artificial Sequence
  OMNI RNA scaffold sequence
aacucacaaua

SEQ ID NO: 627 - RNA, 32 nt, Artificial Sequence
  OMNI RNA scaffold sequence
aaggauuuucuuccguugugagaacauccacu

SEQ ID NO: 628 - RNA, 12 nt, Artificial Sequence
  OMNI RNA scaffold sequence
ggauuuucuucc

SEQ ID NO: 629 - RNA, 52 nt, Artificial Sequence
  OMNI RNA scaffold sequence
ggggggcggcaacgccucccuuucuuuauuucuccgcucaucuugauuuuuu

SEQ ID NO: 630 - RNA, 46 nt, Artificial Sequence
  OMNI RNA scaffold sequence
ggggggcggcaacgccucccuuucuuuauuucuccgcucaucuuga

SEQ ID NO: 631 - RNA, 119 nt, Artificial Sequence
  OMNI RNA scaffold sequence
guugugaguugcuuucgaaagaagcaacucacaauaaggauuuucuuccguugugagaacauccacuggggggcggcaacgccucccuuucuuuauuucuccgcucaucuugauuuuuu

SEQ ID NO: 632 - RNA, 119 nt, Artificial Sequence
  OMNI RNA scaffold sequence
guugugaguugcuuucgaaagaagcaacucacaauaaggaucuucuuccguugugagaacauccacuggggggcggcaacgccucccuuucuuuauuucuccgcucaucuugauuuuuu

SEQ ID NO: 633 - RNA, 32 nt, Artificial Sequence
  OMNI RNA scaffold sequence
aaggaucuucuuccguugugagaacauccacu

SEQ ID NO: 634 - RNA, 16 nt, Artificial Sequence
  OMNI RNA scaffold sequence
guugugauuagcaaaa

SEQ ID NO: 635 - RNA, 15 nt, Artificial Sequence
  OMNI RNA scaffold sequence
guugugauuagcaaa

SEQ ID NO: 636 - RNA, 12 nt, Artificial Sequence
  OMNI RNA scaffold sequence
guugugauuagc

SEQ ID NO: 637 - RNA, 10 nt, Artificial Sequence
  OMNI RNA scaffold sequence
guugugauua

SEQ ID NO: 638 - RNA, 16 nt, Artificial Sequence
  OMNI RNA scaffold sequence
uuuugcuaaucacaau

SEQ ID NO: 639 - RNA, 16 nt, Artificial Sequence
  OMNI RNA scaffold sequence
uuugcuaaucacaaua

SEQ ID NO: 640 - RNA, 13 nt, Artificial Sequence
  OMNI RNA scaffold sequence
gcuaaucacaaua

SEQ ID NO: 641 - RNA, 11 nt, Artificial Sequence
  OMNI RNA scaffold sequence
uaaucacaaua

SEQ ID NO: 642 - RNA, 14 nt, Artificial Sequence
  OMNI RNA scaffold sequence
aaggauuauuccgu

SEQ ID NO: 643 - RNA, 10 nt, Artificial Sequence
  OMNI RNA scaffold sequence
ggauuauucc

SEQ ID NO: 644 - RNA, 15 nt, Artificial Sequence
  OMNI RNA scaffold sequence
ugugaaaacauuuga

SEQ ID NO: 645 - RNA, 25 nt, Artificial Sequence
  OMNI RNA scaffold sequence
gggcggcgaaagucgcccauuuuuu

SEQ ID NO: 646 - RNA, 19 nt, Artificial Sequence
  OMNI RNA scaffold sequence
gggcggcgaaagucgccca

SEQ ID NO: 647 - RNA, 90 nt, Artificial Sequence
  OMNI RNA scaffold sequence
guugugauuagcaaaagaaauuuugcuaaucacaauaaggauuauuccguugugaaaacauuugagggcggcgaaagucgcccauuuuuu

SEQ ID NO: 648 - RNA, 90 nt, Artificial Sequence
  OMNI RNA scaffold sequence
guugugauuagcagaagaaauucugcuaaucacaauaaggauuauuccguugugaaaacauuugagggcggcgaaagucgcccauuuuuu

SEQ ID NO: 649 - RNA, 16 nt, Artificial Sequence
  OMNI RNA scaffold sequence
guugugauuagcagaa

SEQ ID NO: 650 - RNA, 16 nt, Artificial Sequence
  OMNI RNA scaffold sequence
uucugcuaaucacaau

SEQ ID NO: 651 - RNA, 16 nt, Artificial Sequence
  OMNI RNA scaffold sequence
guugugauuagcugaa

SEQ ID NO: 652 - RNA, 15 nt, Artificial Sequence
  OMNI RNA scaffold sequence
guugugauuagcuga

SEQ ID NO: 653 - RNA, 12 nt, Artificial Sequence
  OMNI RNA scaffold sequence
guugugauuagc

SEQ ID NO: 654 - RNA, 10 nt, Artificial Sequence
  OMNI RNA scaffold sequence
guugugauua

SEQ ID NO: 655 - RNA, 15 nt, Artificial Sequence
  OMNI RNA scaffold sequence
ucagcuaaucacaau

SEQ ID NO: 656 - RNA, 15 nt, Artificial Sequence
  OMNI RNA scaffold sequence
cagcuaaucacaaua

SEQ ID NO: 657 - RNA, 13 nt, Artificial Sequence
  OMNI RNA scaffold sequence
gcuaaucacaaua

SEQ ID NO: 658 - RNA, 11 nt, Artificial Sequence
  OMNI RNA scaffold sequence
uaaucacaaua

SEQ ID NO: 659 - RNA, 14 nt, Artificial Sequence
  OMNI RNA scaffold sequence
aaggauuauuccgu

SEQ ID NO: 660 - RNA, 10 nt, Artificial Sequence
  OMNI RNA scaffold sequence
ggauuauucc

SEQ ID NO: 661 - RNA, 15 nt, Artificial Sequence
  OMNI RNA scaffold sequence
ugugaaaacaucuuu

SEQ ID NO: 662 - RNA, 24 nt, Artificial Sequence
  OMNI RNA scaffold sequence
gggcggggaaacucguccuuuuuu

SEQ ID NO: 663 - RNA, 18 nt, Artificial Sequence
  OMNI RNA scaffold sequence
gggcggggaaacucgucc

SEQ ID NO: 664 - RNA, 88 nt, Artificial Sequence
  OMNI RNA scaffold sequence
guugugauuagcugaagaaaucagcuaaucacaauaaggauuauuccguugugaaaacaucuuugggcggggaaacucguccuuuuuu

SEQ ID NO: 665 - RNA, 16 nt, Artificial Sequence
  OMNI RNA scaffold sequence
guugugauuagcugaa

SEQ ID NO: 666 - RNA, 15 nt, Artificial Sequence
  OMNI RNA scaffold sequence
guugugauuagcuga

SEQ ID NO: 667 - RNA, 12 nt, Artificial Sequence
  OMNI RNA scaffold sequence
guugugauuagc

SEQ ID NO: 668 - RNA, 10 nt, Artificial Sequence
  OMNI RNA scaffold sequence
guugugauua

SEQ ID NO: 669 - RNA, 16 nt, Artificial Sequence
  OMNI RNA scaffold sequence
uucagcuaaucacaau

SEQ ID NO: 670 - RNA, 16 nt, Artificial Sequence
  OMNI RNA scaffold sequence
ucagcuaaucacaaua

SEQ ID NO: 671 - RNA, 13 nt, Artificial Sequence
  OMNI RNA scaffold sequence
gcuaaucacaaua

SEQ ID NO: 672 - RNA, 11 nt, Artificial Sequence
  OMNI RNA scaffold sequence
uaaucacaaua

SEQ ID NO: 673 - RNA, 32 nt, Artificial Sequence
  OMNI RNA scaffold sequence
aaggauuauuccguugugaaaacauucggauc

SEQ ID NO: 674 - RNA, 30 nt, Artificial Sequence
  OMNI RNA scaffold sequence
gcccaucauccuaauggugggcacuuuuuu

SEQ ID NO: 675 - RNA, 24 nt, Artificial Sequence
  OMNI RNA scaffold sequence
gcccaucauccuaauggugggcac

SEQ ID NO: 676 - RNA, 98 nt, Artificial Sequence
  OMNI RNA scaffold sequence
guugugauuagcugaagaaauucagcuaaucacaauaaggauuauuccguugugaaaacauucggaucgcccaucauccuaauggugggcacuuuuuu

SEQ ID NO: 677 - RNA, 16 nt, Artificial Sequence
  OMNI RNA scaffold sequence
guugugauuagcugaa

SEQ ID NO: 678 - RNA, 15 nt, Artificial Sequence
  OMNI RNA scaffold sequence
guugugauuagcuga

SEQ ID NO: 679 - RNA, 12 nt, Artificial Sequence
  OMNI RNA scaffold sequence
guugugauuagc

SEQ ID NO: 680 - RNA, 10 nt, Artificial Sequence
  OMNI RNA scaffold sequence
guugugauua

SEQ ID NO: 681 - RNA, 16 nt, Artificial Sequence
  OMNI RNA scaffold sequence
uucagcuaaucacaau

SEQ ID NO: 682 - RNA, 16 nt, Artificial Sequence
  OMNI RNA scaffold sequence
ucagcuaaucacaaua

SEQ ID NO: 683 - RNA, 13 nt, Artificial Sequence
  OMNI RNA scaffold sequence
gcuaaucacaaua

SEQ ID NO: 684 - RNA, 11 nt, Artificial Sequence
  OMNI RNA scaffold sequence
uaaucacaaua

SEQ ID NO: 685 - RNA, 32 nt, Artificial Sequence; identical to SEQ ID NO: 673
  OMNI RNA scaffold sequence

SEQ ID NO: 686 - RNA, 30 nt, Artificial Sequence
  OMNI RNA scaffold sequence
gcccaucgucccccaaggugggcauuuuuu

SEQ ID NO: 687 - RNA, 24 nt, Artificial Sequence
  OMNI RNA scaffold sequence
gcccaucgucccccaaggugggca

SEQ ID NO: 688 - RNA, 98 nt, Artificial Sequence
  OMNI RNA scaffold sequence
guugugauuagcugaagaaauucagcuaaucacaauaaggauuauuccguugugaaaacauucggaucgcccaucgucccccaaggugggcauuuuuu

SEQ ID NO: 689 - RNA, 16 nt, Artificial Sequence
  OMNI RNA scaffold sequence
guugugauuagcugaa

SEQ ID NO: 690 - RNA, 15 nt, Artificial Sequence
  OMNI RNA scaffold sequence
guugugauuagcuga

SEQ ID NO: 691 - RNA, 12 nt, Artificial Sequence
  OMNI RNA scaffold sequence
guugugauuagc

SEQ ID NO: 692 - RNA, 10 nt, Artificial Sequence
  OMNI RNA scaffold sequence
guugugauua

SEQ ID NO: 693 - RNA, 16 nt, Artificial Sequence
  OMNI RNA scaffold sequence
uucagcuaaucacaau

SEQ ID NO: 694 - RNA, 16 nt, Artificial Sequence
  OMNI RNA scaffold sequence
ucagcuaaucacaaua

SEQ ID NO: 695 - RNA, 13 nt, Artificial Sequence
  OMNI RNA scaffold sequence
gcuaaucacaaua

SEQ ID NO: 696 - RNA, 11 nt, Artificial Sequence
  OMNI RNA scaffold sequence
uaaucacaaua

SEQ ID NO: 697 - RNA, 31 nt, Artificial Sequence
  OMNI RNA scaffold sequence
aaggauuauuccguugugaaaacauucggau

SEQ ID NO: 698 - RNA, 30 nt, Artificial Sequence
  OMNI RNA scaffold sequence
cgcccaucguccuaaaggugggcguuuuuu

SEQ ID NO: 699 - RNA, 24 nt, Artificial Sequence
  OMNI RNA scaffold sequence
cgcccaucguccuaaaggugggcg

SEQ ID NO: 700 - RNA, 97 nt, Artificial Sequence
  OMNI RNA scaffold sequence
guugugauuagcugaagaaauucagcuaaucacaauaaggauuauuccguugugaaaacauucggaucgcccaucguccuaaaggugggcguuuuuu

SEQ ID NO: 701 - RNA, 16 nt, Artificial Sequence
  OMNI RNA scaffold sequence
guugugauucgcuuga

SEQ ID NO: 702 - RNA, 15 nt, Artificial Sequence
  OMNI RNA scaffold sequence
guugugauucgcuug

SEQ ID NO: 703 - RNA, 12 nt, Artificial Sequence
  OMNI RNA scaffold sequence
guugugauucgc

SEQ ID NO: 704 - RNA, 10 nt, Artificial Sequence
  OMNI RNA scaffold sequence
guugugauuc

SEQ ID NO: 705 - RNA, 17 nt, Artificial Sequence
  OMNI RNA scaffold sequence
auagcgaaucacaauaa

SEQ ID NO: 706 - RNA, 16 nt, Artificial Sequence
  OMNI RNA scaffold sequence
auagcgaaucacaaua

SEQ ID NO: 707 - RNA, 13 nt, Artificial Sequence
  OMNI RNA scaffold sequence
gcgaaucacaaua

SEQ ID NO: 708 - RNA, 11 nt, Artificial Sequence
  OMNI RNA scaffold sequence
gaaucacaaua

SEQ ID NO: 709 - RNA, 26 nt, Artificial Sequence
  OMNI RNA scaffold sequence
ggauuuuauccguugugaaaacaucc

SEQ ID NO: 710 - RNA, 11 nt, Artificial Sequence
  OMNI RNA scaffold sequence
ggauuuuaucc

SEQ ID NO: 711 - RNA, 31 nt, Artificial Sequence
  OMNI RNA scaffold sequence
ggagaaggggagcaaucccuuucucuuuuuu

SEQ ID NO: 712 - RNA, 25 nt, Artificial Sequence
  OMNI RNA scaffold sequence
ggagaaggggagcaaucccuuucuc

SEQ ID NO: 713 - RNA, 94 nt, Artificial Sequence
  OMNI RNA scaffold sequence
guugugauucgcuugagaaaauagcgaaucacaauaaggauuuuauccguugugaaaacauccggagaaggggagcaaucccuuucucuuuuuu

SEQ ID NO: 714 - RNA, 94 nt, Artificial Sequence
  OMNI RNA scaffold sequence
guugugauucgcuugagaaaauagcgaaucacaauaaggaucuuauccguugugaaaacauccggagaaggggagcaaucccuuucucuuuuuu

SEQ ID NO: 715 - RNA, 26 nt, Artificial Sequence
  OMNI RNA scaffold sequence
ggaucuuauccguugugaaaacaucc

SEQ ID NO: 716 - RNA, 19 nt, Artificial Sequence
  OMNI RNA scaffold sequence
guugugauucgcuuucaaa

SEQ ID NO: 717 - RNA, 15 nt, Artificial Sequence
  OMNI RNA scaffold sequence
guugugauucgcuuu

SEQ ID NO: 718 - RNA, 12 nt, Artificial Sequence
  OMNI RNA scaffold sequence
guugugauucgc

SEQ ID NO: 719 - RNA, 10 nt, Artificial Sequence
  OMNI RNA scaffold sequence
guugugauuc

SEQ ID NO: 720 - RNA, 19 nt, Artificial Sequence
  OMNI RNA scaffold sequence
uuugaaagcaaaucacaau

SEQ ID NO: 721 - RNA, 16 nt, Artificial Sequence
  OMNI RNA scaffold sequence
aaagcaaaucacaaua

SEQ ID NO: 722 - RNA, 13 nt, Artificial Sequence
  OMNI RNA scaffold sequence
gcaaaucacaaua

SEQ ID NO: 723 - RNA, 11 nt, Artificial Sequence
  OMNI RNA scaffold sequence
aaaucacaaua

SEQ ID NO: 724 - RNA, 14 nt, Artificial Sequence
  OMNI RNA scaffold sequence
aaggaucauuccgu

SEQ ID NO: 725 - RNA, 10 nt, Artificial Sequence
  OMNI RNA scaffold sequence
ggaucauucc

SEQ ID NO: 726 - RNA, 13 nt, Artificial Sequence
  OMNI RNA scaffold sequence
ugugaaaacauuu

SEQ ID NO: 727 - RNA, 35 nt, Artificial Sequence
  OMNI RNA scaffold sequence
ggaagggggaguauuuauacuccucguucuuuuuu

SEQ ID NO: 728 - RNA, 29 nt, Artificial Sequence
  OMNI RNA scaffold sequence
ggaagggggaguauuuauacuccucguuc

SEQ ID NO: 729 - RNA, 104 nt, Artificial Sequence
  OMNI RNA scaffold sequence
guugugauucgcuuucaaagaaauuugaaagcaaaucacaauaaggaucauuccguugugaaaacauuuggaagggggaguauuuauacuccucguucuuuuuu

SEQ ID NO: 730 - RNA, 19 nt, Artificial Sequence
  OMNI RNA scaffold sequence
guugugauucgcuuucaaa

SEQ ID NO: 731 - RNA, 15 nt, Artificial Sequence
  OMNI RNA scaffold sequence
guugugauucgcuuu

SEQ ID NO: 732 - RNA, 12 nt, Artificial Sequence
  OMNI RNA scaffold sequence
guugugauucgc

SEQ ID NO: 733 - RNA, 10 nt, Artificial Sequence
  OMNI RNA scaffold sequence
guugugauuc

SEQ ID NO: 734 - RNA, 19 nt, Artificial Sequence
  OMNI RNA scaffold sequence
uuugaaagcaaaucacaau

SEQ ID NO: 735 - RNA, 16 nt, Artificial Sequence
  OMNI RNA scaffold sequence
aaagcaaaucacaaua

SEQ ID NO: 736 - RNA, 13 nt, Artificial Sequence
  OMNI RNA scaffold sequence
gcaaaucacaaua

SEQ ID NO: 737 - RNA, 11 nt, Artificial Sequence
  OMNI RNA scaffold sequence
aaaucacaaua

SEQ ID NO: 738 - RNA, 14 nt, Artificial Sequence
  OMNI RNA scaffold sequence
aaggauuauuccgu

SEQ ID NO: 739 - RNA, 10 nt, Artificial Sequence
  OMNI RNA scaffold sequence
ggauuauucc

SEQ ID NO: 740 - RNA, 13 nt, Artificial Sequence
  OMNI RNA scaffold sequence
ugugaaaacauuu

SEQ ID NO: 741 - RNA, 35 nt, Artificial Sequence; identical to SEQ ID NO: 727
  OMNI RNA scaffold sequence

SEQ ID NO: 742 - RNA, 29 nt, Artificial Sequence
  OMNI RNA scaffold sequence
ggaagggggaguauuuauacuccucguuc

SEQ ID NO: 743 - RNA, 104 nt, Artificial Sequence
  OMNI RNA scaffold sequence
guugugauucgcuuucaaagaaauuugaaagcaaaucacaauaaggauuauuccguugugaaaacauuuggaagggggaguauuuauacuccucguucuuuuuu

SEQ ID NO: 744 - RNA, 16 nt, Artificial Sequence
  OMNI RNA scaffold sequence
guugugauuugcauua

SEQ ID NO: 745 - RNA, 15 nt, Artificial Sequence
  OMNI RNA scaffold sequence
guugugauuugcauu

SEQ ID NO: 746 - RNA, 12 nt, Artificial Sequence
  OMNI RNA scaffold sequence
guugugauuugc

SEQ ID NO: 747 - RNA, 10 nt, Artificial Sequence
  OMNI RNA scaffold sequence
guugugauuu

SEQ ID NO: 748 - RNA, 15 nt, Artificial Sequence
  OMNI RNA scaffold sequence
uaugcaaaucacaau

SEQ ID NO: 749 - RNA, 15 nt, Artificial Sequence
  OMNI RNA scaffold sequence
augcaaaucacaaua

SEQ ID NO: 750 - RNA, 13 nt, Artificial Sequence
  OMNI RNA scaffold sequence
gcaaaucacaaua

SEQ ID NO: 751 - RNA, 11 nt, Artificial Sequence
  OMNI RNA scaffold sequence
aaaucacaaua

SEQ ID NO: 752 - RNA, 14 nt, Artificial Sequence
  OMNI RNA scaffold sequence
aaggauuauuccgu

SEQ ID NO: 753 - RNA, 10 nt, Artificial Sequence
  OMNI RNA scaffold sequence
ggauuauucc

SEQ ID NO: 754 - RNA, 18 nt, Artificial Sequence
  OMNI RNA scaffold sequence
ugugaaaacauuagguuu

SEQ ID NO: 755 - RNA, 30 nt, Artificial Sequence
  OMNI RNA scaffold sequence
ugcucucguccuuuaacgggagcauuuuuu

SEQ ID NO: 756 - RNA, 24 nt, Artificial Sequence
  OMNI RNA scaffold sequence
ugcucucguccuuuaacgggagca

SEQ ID NO: 757 - RNA, 97 nt, Artificial Sequence
  OMNI RNA scaffold sequence
guugugauuugcauuagaaauaugcaaaucacaauaaggauuauuccguugugaaaacauuagguuuugcucucguccuuuaacgggagcauuuuuu

SEQ ID NO: 758 - RNA, 97 nt, Artificial Sequence
  OMNI RNA scaffold sequence
guugugauuugcauuagaaauaugcaaaucacaauaaggauuauuccguugugaaaacauuagguucugcucucguccuuuaacgggagcauuuuuu

SEQ ID NO: 759 - RNA, 18 nt, Artificial Sequence
  OMNI RNA scaffold sequence
ugugaaaacauuagguuc

SEQ ID NO: 760 - RNA, 16 nt, Artificial Sequence
  OMNI RNA scaffold sequence
guugugauuugccuac

SEQ ID NO: 761 - RNA, 15 nt, Artificial Sequence
  OMNI RNA scaffold sequence
guugugauuugccua

SEQ ID NO: 762 - RNA, 12 nt, Artificial Sequence
  OMNI RNA scaffold sequence
guugugauuugc

SEQ ID NO: 763 - RNA, 10 nt, Artificial Sequence
  OMNI RNA scaffold sequence
guugugauuu

SEQ ID NO: 764 - RNA, 16 nt, Artificial Sequence
  OMNI RNA scaffold sequence
auaggcaaaucacaau

SEQ ID NO: 765 - RNA, 16 nt, Artificial Sequence
  OMNI RNA scaffold sequence
uaggcaaaucacaaua

SEQ ID NO: 766 - RNA, 13 nt, Artificial Sequence
  OMNI RNA scaffold sequence
gcaaaucacaaua

SEQ ID NO: 767 - RNA, 11 nt, Artificial Sequence
  OMNI RNA scaffold sequence
aaaucacaaua

SEQ ID NO: 768 - RNA, 16 nt, Artificial Sequence
  OMNI RNA scaffold sequence
aaggauuuuauuccgu

SEQ ID NO: 769 - RNA, 12 nt, Artificial Sequence
  OMNI RNA scaffold sequence
ggauuuuauucc

SEQ ID NO: 770 - RNA, 13 nt, Artificial Sequence
  OMNI RNA scaffold sequence
ugugaaaacauuu

SEQ ID NO: 771 - RNA, 44 nt, Artificial Sequence
  OMNI RNA scaffold sequence
ggaaagaggagcaucgccuauugguuaugcucucuuucuuuuuu

SEQ ID NO: 772 - RNA, 38 nt, Artificial Sequence
  OMNI RNA scaffold sequence
ggaaagaggagcaucgccuauugguuaugcucucuuuc

SEQ ID NO: 773 - RNA, 109 nt, Artificial Sequence
  OMNI RNA scaffold sequence
guugugauuugccuacgaaaauaggcaaaucacaauaaggauuuuauuccguugugaaaacauuuggaaagaggagcaucgccuauugguuaugcucucuuucuuuuuu

SEQ ID NO: 774 - RNA, 109 nt, Artificial Sequence
  OMNI RNA scaffold sequence
guugugauuugccuacgaaaauaggcaaaucacaauaaggauuucauuccguugugaaaacauuuggaaagaggagcaucgccuauugguuaugcucucuuucuuuuuu

SEQ ID NO: 775 - RNA, 16 nt, Artificial Sequence
  OMNI RNA scaffold sequence
aaggauuucauuccgu

SEQ ID NO: 776 - RNA, 16 nt, Artificial Sequence
  OMNI RNA scaffold sequence
guugugauuugcguaa

SEQ ID NO: 777 - RNA, 15 nt, Artificial Sequence
  OMNI RNA scaffold sequence
guugugauuugcgua

SEQ ID NO: 778 - RNA, 12 nt, Artificial Sequence
  OMNI RNA scaffold sequence
guugugauuugc

SEQ ID NO: 779 - RNA, 10 nt, Artificial Sequence
  OMNI RNA scaffold sequence
guugugauuu

SEQ ID NO: 780 - RNA, 15 nt, Artificial Sequence
  OMNI RNA scaffold sequence
uucgcaaaucacaau

SEQ ID NO: 781 - RNA, 15 nt, Artificial Sequence
  OMNI RNA scaffold sequence
ucgcaaaucacaaua

SEQ ID NO: 782 - RNA, 13 nt, Artificial Sequence
  OMNI RNA scaffold sequence
gcaaaucacaaua

SEQ ID NO: 783 - RNA, 11 nt, Artificial Sequence
  OMNI RNA scaffold sequence
aaaucacaaua

SEQ ID NO: 784 - RNA, 32 nt, Artificial Sequence
  OMNI RNA scaffold sequence
aaggauuauuccguugugaguacauucaggua

SEQ ID NO: 785 - RNA, 10 nt, Artificial Sequence
  OMNI RNA scaffold sequence
ggauuauucc

SEQ ID NO: 786 - RNA, 31 nt, Artificial Sequence
  OMNI RNA scaffold sequence
gcccaucgaccuuuaacggugggcauuuuuu

SEQ ID NO: 787 - RNA, 25 nt, Artificial Sequence
  OMNI RNA scaffold sequence
gcccaucgaccuuuaacggugggca

SEQ ID NO: 788 - RNA, 98 nt, Artificial Sequence
  OMNI RNA scaffold sequence
guugugauuugcguaagaaauucgcaaaucacaauaaggauuauuccguugugaguacauucagguagcccaucgaccuuuaacggugggcauuuuuu

SEQ ID NO: 789 - RNA, 16 nt, Artificial Sequence
  OMNI RNA scaffold sequence
guugugauuugcuaaa

SEQ ID NO: 790 - RNA, 15 nt, Artificial Sequence
  OMNI RNA scaffold sequence
guugugauuugcuaa

SEQ ID NO: 791 - RNA, 12 nt, Artificial Sequence
  OMNI RNA scaffold sequence
guugugauuugc

SEQ ID NO: 792 - RNA, 10 nt, Artificial Sequence
  OMNI RNA scaffold sequence
guugugauuu

SEQ ID NO: 793 - RNA, 15 nt, Artificial Sequence
  OMNI RNA scaffold sequence
uuagcaaaucacaau

SEQ ID NO: 794 - RNA, 15 nt, Artificial Sequence
  OMNI RNA scaffold sequence
uagcaaaucacaaua

SEQ ID NO: 795 - RNA, 13 nt, Artificial Sequence
  OMNI RNA scaffold sequence
gcaaaucacaaua

SEQ ID NO: 796 - RNA, 11 nt, Artificial Sequence
  OMNI RNA scaffold sequence
aaaucacaaua

SEQ ID NO: 797 - RNA, 34 nt, Artificial Sequence
  OMNI RNA scaffold sequence
aaggauuauuccguugugaaaacauuagguccuu

SEQ ID NO: 798 - RNA, 29 nt, Artificial Sequence
  OMNI RNA scaffold sequence
ggucaucgucuuuaacggugaccuuuuuu

SEQ ID NO: 799 - RNA, 23 nt, Artificial Sequence
  OMNI RNA scaffold sequence
ggucaucgucuuuaacggugacc

SEQ ID NO: 800 - RNA, 98 nt, Artificial Sequence
  OMNI RNA scaffold sequence
guugugauuugcuaaagaaauuagcaaaucacaauaaggauuauuccguugugaaaacauuagguccuuggucaucgucuuuaacggugaccuuuuuu

SEQ ID NO: 801 - RNA, 16 nt, Artificial Sequence
  OMNI RNA scaffold sequence
guugugauuugcuaaa

SEQ ID NO: 802 - RNA, 15 nt, Artificial Sequence
  OMNI RNA scaffold sequence
guugugauuugcuaa

SEQ ID NO: 803 - RNA, 12 nt, Artificial Sequence
  OMNI RNA scaffold sequence
guugugauuugc

SEQ ID NO: 804 - RNA, 10 nt, Artificial Sequence
  OMNI RNA scaffold sequence
guugugauuu

SEQ ID NO: 805 - RNA, 15 nt, Artificial Sequence
  OMNI RNA scaffold sequence
uuagcaaaucacaau

SEQ ID NO: 806 - RNA, 15 nt, Artificial Sequence
  OMNI RNA scaffold sequence
uagcaaaucacaaua

SEQ ID NO: 807 - RNA, 13 nt, Artificial Sequence
  OMNI RNA scaffold sequence
gcaaaucacaaua

SEQ ID NO: 808 - RNA, 11 nt, Artificial Sequence
  OMNI RNA scaffold sequence
aaaucacaaua

SEQ ID NO: 809 - RNA, 33 nt, Artificial Sequence
  OMNI RNA scaffold sequence
aaggauuauuccguugugaaaacauuagguccu

SEQ ID NO: 810 - RNA, 30 nt, Artificial Sequence
  OMNI RNA scaffold sequence
gguccaucguccucaacgguggacuuuuuu

SEQ ID NO: 811 - RNA, 24 nt, Artificial Sequence
  OMNI RNA scaffold sequence
gguccaucguccucaacgguggac

SEQ ID NO: 812 - RNA, 98 nt, Artificial Sequence
  OMNI RNA scaffold sequence
guugugauuugcuaaagaaauuagcaaaucacaauaaggauuauuccguugugaaaacauuagguccugguccaucguccucaacgguggacuuuuuu

SEQ ID NO: 813 - RNA, 16 nt, Artificial Sequence
  OMNI RNA scaffold sequence
guugugauuugcuaaa

SEQ ID NO: 814 - RNA, 15 nt, Artificial Sequence
  OMNI RNA scaffold sequence
guugugauuugcuaa

SEQ ID NO: 815 - RNA, 12 nt, Artificial Sequence
  OMNI RNA scaffold sequence
guugugauuugc

SEQ ID NO: 816 - RNA, 10 nt, Artificial Sequence
  OMNI RNA scaffold sequence
guugugauuu

SEQ ID NO: 817 - RNA, 15 nt, Artificial Sequence
  OMNI RNA scaffold sequence
uuagcaaaucacaau

SEQ ID NO: 818 - RNA, 15 nt, Artificial Sequence
  OMNI RNA scaffold sequence
uagcaaaucacaaua

SEQ ID NO: 819 - RNA, 13 nt, Artificial Sequence
  OMNI RNA scaffold sequence
gcaaaucacaaua

SEQ ID NO: 820 - RNA, 11 nt, Artificial Sequence
  OMNI RNA scaffold sequence
aaaucacaaua

SEQ ID NO: 821 - RNA, 31 nt, Artificial Sequence
  OMNI RNA scaffold sequence
aaggauuauuccguugugaacacauuagguu

SEQ ID NO: 822 - RNA, 10 nt, Artificial Sequence
  OMNI RNA scaffold sequence
ggauuauucc

SEQ ID NO: 823 - RNA, 30 nt, Artificial Sequence
  OMNI RNA scaffold sequence
ggcccaucguccuuuaacgguggguuuuuu

SEQ ID NO: 824 - RNA, 24 nt, Artificial Sequence
  OMNI RNA scaffold sequence
ggcccaucguccuuuaacgguggg

SEQ ID NO: 825 - RNA, 96 nt, Artificial Sequence
  OMNI RNA scaffold sequence
guugugauuugcuaaagaaauuagcaaaucacaauaaggauuauuccguugugaacacauuagguuggcccaucguccuuuaacgguggguuuuuu

SEQ ID NO: 826 - RNA, 16 nt, Artificial Sequence
  OMNI RNA scaffold sequence
guugugauuugcuaga

SEQ ID NO: 827 - RNA, 15 nt, Artificial Sequence
  OMNI RNA scaffold sequence
guugugauuugcuag

SEQ ID NO: 828 - RNA, 12 nt, Artificial Sequence
  OMNI RNA scaffold sequence
guugugauuugc

SEQ ID NO: 829 - RNA, 10 nt, Artificial Sequence
  OMNI RNA scaffold sequence
guugugauuu

SEQ ID NO: 830 - RNA, 16 nt, Artificial Sequence
  OMNI RNA scaffold sequence
ucuagcaaaucacaau

SEQ ID NO: 831 - RNA, 16 nt, Artificial Sequence
  OMNI RNA scaffold sequence
cuagcaaaucacaaua

SEQ ID NO: 832 - RNA, 13 nt, Artificial Sequence
  OMNI RNA scaffold sequence
gcaaaucacaaua

SEQ ID NO: 833 - RNA, 11 nt, Artificial Sequence
  OMNI RNA scaffold sequence
aaaucacaaua

SEQ ID NO: 834 - RNA, 33 nt, Artificial Sequence
  OMNI RNA scaffold sequence
aaggauuauuccguugugaaaacauuagguccc

SEQ ID NO: 835 - RNA, 33 nt, Artificial Sequence
  OMNI RNA scaffold sequence
auccccaucguccuuuaacgguggggauuuuuu

SEQ ID NO: 836 - RNA, 27 nt, Artificial Sequence
  OMNI RNA scaffold sequence
auccccaucguccuuuaacggugggga

SEQ ID NO: 837 - RNA, 102 nt, Artificial Sequence
  OMNI RNA scaffold sequence
guugugauuugcuagagaaaucuagcaaaucacaauaaggauuauuccguugugaaaacauuaggucccauccccaucguccuuuaacgguggggauuuuuu

SEQ ID NO: 838 - RNA, 16 nt, Artificial Sequence
  OMNI RNA scaffold sequence
guugugauuugcuaga

SEQ ID NO: 839 - RNA, 15 nt, Artificial Sequence
  OMNI RNA scaffold sequence
guugugauuugcuag

SEQ ID NO: 840 - RNA, 12 nt, Artificial Sequence
  OMNI RNA scaffold sequence
guugugauuugc

SEQ ID NO: 841 - RNA, 10 nt, Artificial Sequence
  OMNI RNA scaffold sequence
guugugauuu

SEQ ID NO: 842 - RNA, 15 nt, Artificial Sequence
  OMNI RNA scaffold sequence
uuagcaaaucacaau

SEQ ID NO: 843 - RNA, 15 nt, Artificial Sequence
  OMNI RNA scaffold sequence
uagcaaaucacaaua

SEQ ID NO: 844 - RNA, 13 nt, Artificial Sequence
  OMNI RNA scaffold sequence
gcaaaucacaaua

SEQ ID NO: 845 - RNA, 11 nt, Artificial Sequence
  OMNI RNA scaffold sequence
aaaucacaaua

SEQ ID NO: 846 - RNA, 33 nt, Artificial Sequence; identical to SEQ ID NO: 834
  OMNI RNA scaffold sequence

SEQ ID NO: 847 - RNA, 30 nt, Artificial Sequence
  OMNI RNA scaffold sequence
aguccaucguccucaacgguggacuuuuuu

SEQ ID NO: 848 - RNA, 24 nt, Artificial Sequence
  OMNI RNA scaffold sequence
aguccaucguccucaacgguggac

SEQ ID NO: 849 - RNA, 98 nt, Artificial Sequence
  OMNI RNA scaffold sequence
guugugauuugcuagagaaauuagcaaaucacaauaaggauuauuccguugugaaaacauuaggucccaguccaucguccucaacgguggacuuuuuu

SEQ ID NO: 850 - RNA, 16 nt, Artificial Sequence
  OMNI RNA scaffold sequence
guugugauuugcucaa

SEQ ID NO: 851 - RNA, 15 nt, Artificial Sequence
  OMNI RNA scaffold sequence
guugugauuugcuca

SEQ ID NO: 852 - RNA, 12 nt, Artificial Sequence
  OMNI RNA scaffold sequence
guugugauuugc

SEQ ID NO: 853 - RNA, 10 nt, Artificial Sequence
  OMNI RNA scaffold sequence
guugugauuu

SEQ ID NO: 854 - RNA, 16 nt, Artificial Sequence
  OMNI RNA scaffold sequence
uugagcaaaucacaau

SEQ ID NO: 855 - RNA, 16 nt, Artificial Sequence
  OMNI RNA scaffold sequence
ugagcaaaucacaaua

SEQ ID NO: 856 - RNA, 13 nt, Artificial Sequence
  OMNI RNA scaffold sequence
gcaaaucacaaua

SEQ ID NO: 857 - RNA, 11 nt, Artificial Sequence
  OMNI RNA scaffold sequence
aaaucacaaua

SEQ ID NO: 858 - RNA, 14 nt, Artificial Sequence
  OMNI RNA scaffold sequence
aaggauuauuccgu

SEQ ID NO: 859 - RNA, 10 nt, Artificial Sequence
  OMNI RNA scaffold sequence
ggauuauucc

SEQ ID NO: 860 - RNA, 17 nt, Artificial Sequence
  OMNI RNA scaffold sequence
ugugaaaacauuagguu

SEQ ID NO: 861 - RNA, 30 nt, Artificial Sequence; identical to SEQ ID NO: 823
  OMNI RNA scaffold sequence

SEQ ID NO: 862 - RNA, 24 nt, Artificial Sequence
  OMNI RNA scaffold sequence
ggcccaucguccuuuaacgguggg

SEQ ID NO: 863 - RNA, 97 nt, Artificial Sequence
  OMNI RNA scaffold sequence
guugugauuugcucaagaaauugagcaaaucacaauaaggauuauuccguugugaaaacauuagguuggcccaucguccuuuaacgguggguuuuuu

SEQ ID NO: 864 - RNA, 16 nt, Artificial Sequence
  OMNI RNA scaffold sequence
guugugauuugcugac

SEQ ID NO: 865 - RNA, 15 nt, Artificial Sequence
  OMNI RNA scaffold sequence
guugugauuugcuga

SEQ ID NO: 866 - RNA, 12 nt, Artificial Sequence
  OMNI RNA scaffold sequence
guugugauuugc

SEQ ID NO: 867 - RNA, 10 nt, Artificial Sequence
  OMNI RNA scaffold sequence
guugugauuu

SEQ ID NO: 868 - RNA, 16 nt, Artificial Sequence
  OMNI RNA scaffold sequence
aucagcaaaucacaau

SEQ ID NO: 869 - RNA, 16 nt, Artificial Sequence
  OMNI RNA scaffold sequence
ucagcaaaucacaaua

SEQ ID NO: 870 - RNA, 13 nt, Artificial Sequence
  OMNI RNA scaffold sequence
gcaaaucacaaua

SEQ ID NO: 871 - RNA, 11 nt, Artificial Sequence
  OMNI RNA scaffold sequence
aaaucacaaua

SEQ ID NO: 872 - RNA, 14 nt, Artificial Sequence
  OMNI RNA scaffold sequence
aaggauuauuccgu

SEQ ID NO: 873 - RNA, 10 nt, Artificial Sequence
  OMNI RNA scaffold sequence
ggauuauucc

SEQ ID NO: 874 - RNA, 13 nt, Artificial Sequence
  OMNI RNA scaffold sequence
ugugaaaacauuu

SEQ ID NO: 875 - RNA, 25 nt, Artificial Sequence
  OMNI RNA scaffold sequence
aggguggggcaacucacccuuuuuu

SEQ ID NO: 876 - RNA, 19 nt, Artificial Sequence
  OMNI RNA scaffold sequence
aggguggggcaacucaccc

SEQ ID NO: 877 - RNA, 88 nt, Artificial Sequence
  OMNI RNA scaffold sequence
guugugauuugcugacgaaaaucagcaaaucacaauaaggauuauuccguugugaaaacauuuaggguggggcaacucacccuuuuuu

SEQ ID NO: 878 - RNA, 16 nt, Artificial Sequence
  OMNI RNA scaffold sequence
guugugauuugcuuaa

SEQ ID NO: 879 - RNA, 15 nt, Artificial Sequence
  OMNI RNA scaffold sequence
guugugauuugcuua

SEQ ID NO: 880 - RNA, 12 nt, Artificial Sequence
  OMNI RNA scaffold sequence
guugugauuugc

SEQ ID NO: 881 - RNA, 10 nt, Artificial Sequence
  OMNI RNA scaffold sequence
guugugauuu

SEQ ID NO: 882 - RNA, 15 nt, Artificial Sequence
  OMNI RNA scaffold sequence
uaagcaaaucacaau

SEQ ID NO: 883 - RNA, 16 nt, Artificial Sequence
  OMNI RNA scaffold sequence
uaagcaaaucacaaua

SEQ ID NO: 884 - RNA, 13 nt, Artificial Sequence
  OMNI RNA scaffold sequence
gcaaaucacaaua

SEQ ID NO: 885 - RNA, 11 nt, Artificial Sequence
  OMNI RNA scaffold sequence
aaaucacaaua

SEQ ID NO: 886 - RNA, 13 nt, Artificial Sequence
  OMNI RNA scaffold sequence
aaggauuauuccg

SEQ ID NO: 887 - RNA, 10 nt, Artificial Sequence
  OMNI RNA scaffold sequence
ggauuauucc

SEQ ID NO: 888 - RNA, 14 nt, Artificial Sequence
  OMNI RNA scaffold sequence
uugugaaaacaaau

SEQ ID NO: 889 - RNA, 24 nt, Artificial Sequence
  OMNI RNA scaffold sequence
gggcggggugacucgcccuuuuuu

SEQ ID NO: 890 - RNA, 18 nt, Artificial Sequence
  OMNI RNA scaffold sequence
gggcggggugacucgccc

SEQ ID NO: 891 - RNA, 86 nt, Artificial Sequence
  OMNI RNA scaffold sequence
guugugauuugcuuaagaaauaagcaaaucacaauaaggauuauuccguugugaaaacaaaugggcggggugacucgcccuuuuuu

SEQ ID NO: 892 - RNA, 19 nt, Artificial Sequence
  OMNI RNA scaffold sequence
guugugauuugcuuaaaau

SEQ ID NO: 893 - RNA, 15 nt, Artificial Sequence
  OMNI RNA scaffold sequence
guugugauuugcuua

SEQ ID NO: 894 - RNA, 12 nt, Artificial Sequence
  OMNI RNA scaffold sequence
guugugauuugc

SEQ ID NO: 895 - RNA, 10 nt, Artificial Sequence
  OMNI RNA scaffold sequence
guugugauuu

SEQ ID NO: 896 - RNA, 19 nt, Artificial Sequence
  OMNI RNA scaffold sequence
gugaaagacuuuucacaac

SEQ ID NO: 897 - RNA, 17 nt, Artificial Sequence
  OMNI RNA scaffold sequence
aaagacuuuucacaaca

SEQ ID NO: 898 - RNA, 14 nt, Artificial Sequence
  OMNI RNA scaffold sequence
gacuuuucacaaca

SEQ ID NO: 899 - RNA, 11 nt, Artificial Sequence
  OMNI RNA scaffold sequence
uuuucacaaca

SEQ ID NO: 900 - RNA, 24 nt, Artificial Sequence
  OMNI RNA scaffold sequence
aaggcuauaagccguagauuucuu

SEQ ID NO: 901 - RNA, 11 nt, Artificial Sequence
  OMNI RNA scaffold sequence
ggcuauaagcc

SEQ ID NO: 902 - RNA, 28 nt, Artificial Sequence
  OMNI RNA scaffold sequence
acuccugcguacuccgugggaguuuuuu

SEQ ID NO: 903 - RNA, 22 nt, Artificial Sequence
  OMNI RNA scaffold sequence
acuccugcguacuccgugggag

SEQ ID NO: 904 - RNA, 94 nt, Artificial Sequence
  OMNI RNA scaffold sequence
guugugauuugcuuaaaaugaaagugaaagacuuuucacaacaaggcuauaagccguagauuucuuacuccugcguacuccgugggaguuuuuu

SEQ ID NO: 905 - RNA, 94 nt, Artificial Sequence
  OMNI RNA scaffold sequence
guugugauuugcuuaaaaugaaagugaaagacuucucacaacaaggcuauaagccguagauuucuuacuccugcguacuccgugggaguuuuuu

SEQ ID NO: 906 - RNA, 19 nt, Artificial Sequence
  OMNI RNA scaffold sequence
gugaaagacuucucacaac

SEQ ID NO: 907 - RNA, 16 nt, Artificial Sequence
  OMNI RNA scaffold sequence
guugugauuugcuuag

SEQ ID NO: 908 - RNA, 15 nt, Artificial Sequence
  OMNI RNA scaffold sequence
guugugauuugcuua

SEQ ID NO: 909 - RNA, 12 nt, Artificial Sequence
  OMNI RNA scaffold sequence
guugugauuugc

SEQ ID NO: 910 - RNA, 10 nt, Artificial Sequence
  OMNI RNA scaffold sequence
guugugauuu

SEQ ID NO: 911 - RNA, 15 nt, Artificial Sequence
  OMNI RNA scaffold sequence
cuagcaaaucacaau

SEQ ID NO: 912 - RNA, 15 nt, Artificial Sequence
  OMNI RNA scaffold sequence
uagcaaaucacaaua

SEQ ID NO: 913 - RNA, 13 nt, Artificial Sequence
  OMNI RNA scaffold sequence
gcaaaucacaaua

SEQ ID NO: 914 - RNA, 11 nt, Artificial Sequence
  OMNI RNA scaffold sequence
aaaucacaaua

SEQ ID NO: 915 - RNA, 17 nt, Artificial Sequence
  OMNI RNA scaffold sequence
aaggauuauuccguugu

SEQ ID NO: 916 - RNA, 10 nt, Artificial Sequence
  OMNI RNA scaffold sequence
ggauuauucc

SEQ ID NO: 917 - RNA, 16 nt, Artificial Sequence
  OMNI RNA scaffold sequence
gaacacaucagguucu

SEQ ID NO: 918 - RNA, 32 nt, Artificial Sequence
  OMNI RNA scaffold sequence
uccccaucguccuuuaacgguggggauuuuuu

SEQ ID NO: 919 - RNA, 26 nt, Artificial Sequence
  OMNI RNA scaffold sequence
uccccaucguccuuuaacggugggga

SEQ ID NO: 920 - RNA, 100 nt, Artificial Sequence
  OMNI RNA scaffold sequence
guugugauuugcuuaggaaacuagcaaaucacaauaaggauuauuccguugugaacacaucagguucuuccccaucguccuuuaacgguggggauuuuuu

SEQ ID NO: 921 - RNA, 16 nt, Artificial Sequence
  OMNI RNA scaffold sequence
guugugauuugcuuag

SEQ ID NO: 922 - RNA, 15 nt, Artificial Sequence
  OMNI RNA scaffold sequence
guugugauuugcuua

SEQ ID NO: 923 - RNA, 12 nt, Artificial Sequence
  OMNI RNA scaffold sequence
guugugauuugc

SEQ ID NO: 924 - RNA, 10 nt, Artificial Sequence
  OMNI RNA scaffold sequence
guugugauuu

SEQ ID NO: 925 - RNA, 15 nt, Artificial Sequence
  OMNI RNA scaffold sequence
uaagcaaaucacaau

SEQ ID NO: 926 - RNA, 16 nt, Artificial Sequence
  OMNI RNA scaffold sequence
uaagcaaaucacaaua

SEQ ID NO: 927 - RNA, 13 nt, Artificial Sequence
  OMNI RNA scaffold sequence
gcaaaucacaaua

SEQ ID NO: 928 - RNA, 11 nt, Artificial Sequence
  OMNI RNA scaffold sequence
aaaucacaaua

SEQ ID NO: 929 - RNA, 33 nt, Artificial Sequence
  OMNI RNA scaffold sequence
aaggauuauuccguugugaaaacauccggagag

SEQ ID NO: 930 - RNA, 10 nt, Artificial Sequence
  OMNI RNA scaffold sequence
ggauuauucc

SEQ ID NO: 931 - RNA, 20 nt, Artificial Sequence
  OMNI RNA scaffold sequence
ggaaagccgacagguuuuuu

SEQ ID NO: 932 - RNA, 14 nt, Artificial Sequence
  OMNI RNA scaffold sequence
ggaaagccgacagg

SEQ ID NO: 933 - RNA, 88 nt, Artificial Sequence
  OMNI RNA scaffold sequence
guugugauuugcuuaggaaauaagcaaaucacaauaaggauuauuccguugugaaaacauccggagagggaaagccgacagguuuuuu

SEQ ID NO: 934 - RNA, 16 nt, Artificial Sequence
  OMNI RNA scaffold sequence
guugugauuugcuuua

SEQ ID NO: 935 - RNA, 15 nt, Artificial Sequence
  OMNI RNA scaffold sequence
guugugauuugcuuu

SEQ ID NO: 936 - RNA, 12 nt, Artificial Sequence
  OMNI RNA scaffold sequence
guugugauuugc

SEQ ID NO: 937 - RNA, 10 nt, Artificial Sequence
  OMNI RNA scaffold sequence
guugugauuu

SEQ ID NO: 938 - RNA, 15 nt, Artificial Sequence
  OMNI RNA scaffold sequence
uaagcaaaucacaau

SEQ ID NO: 939 - RNA, 15 nt, Artificial Sequence
  OMNI RNA scaffold sequence
aagcaaaucacaaua

SEQ ID NO: 940 - RNA, 13 nt, Artificial Sequence
  OMNI RNA scaffold sequence
gcaaaucacaaua

SEQ ID NO: 941 - RNA, 11 nt, Artificial Sequence
  OMNI RNA scaffold sequence
aaaucacaaua

SEQ ID NO: 942 - RNA, 14 nt, Artificial Sequence
  OMNI RNA scaffold sequence
aaggauuauuccgu

SEQ ID NO: 943 - RNA, 10 nt, Artificial Sequence
  OMNI RNA scaffold sequence
ggauuauucc

SEQ ID NO: 944 - RNA, 19 nt, Artificial Sequence
  OMNI RNA scaffold sequence
ugugaaaacauuagguucu

SEQ ID NO: 945 - RNA, 32 nt, Artificial Sequence
  OMNI RNA scaffold sequence
gcccucguccuuuaacgggggcuuucuuuuuu

SEQ ID NO: 946 - RNA, 26 nt, Artificial Sequence
  OMNI RNA scaffold sequence
gcccucguccuuuaacgggggcuuuc

SEQ ID NO: 947 - RNA, 100 nt, Artificial Sequence
  OMNI RNA scaffold sequence
guugugauuugcuuuagaaauaagcaaaucacaauaaggauuauuccguugugaaaacauuagguucugcccucguccuuuaacgggggcuuucuuuuuu

SEQ ID NO: 948 - RNA, 16 nt, Artificial Sequence
  OMNI RNA scaffold sequence
guugugauuugcuuua

SEQ ID NO: 949 - RNA, 15 nt, Artificial Sequence
  OMNI RNA scaffold sequence
guugugauuugcuuu

SEQ ID NO: 950 - RNA, 12 nt, Artificial Sequence
  OMNI RNA scaffold sequence
guugugauuugc

SEQ ID NO: 951 - RNA, 10 nt, Artificial Sequence
  OMNI RNA scaffold sequence
guugugauuu

SEQ ID NO: 952 - RNA, 15 nt, Artificial Sequence
  OMNI RNA scaffold sequence
uaagcaaaucacaau

SEQ ID NO: 953 - RNA, 15 nt, Artificial Sequence
  OMNI RNA scaffold sequence
aagcaaaucacaaua

SEQ ID NO: 954 - RNA, 13 nt, Artificial Sequence
  OMNI RNA scaffold sequence
gcaaaucacaaua

SEQ ID NO: 955 - RNA, 11 nt, Artificial Sequence
  OMNI RNA scaffold sequence
aaaucacaaua

SEQ ID NO: 956 - RNA, 15 nt, Artificial Sequence
  OMNI RNA scaffold sequence
aaggauuuuauccgu

SEQ ID NO: 957 - RNA, 11 nt, Artificial Sequence
  OMNI RNA scaffold sequence
ggauuuuaucc

SEQ ID NO: 958 - RNA, 13 nt, Artificial Sequence
  OMNI RNA scaffold sequence
ugugaaaacauuu

SEQ ID NO: 959 - RNA, 27 nt, Artificial Sequence
  OMNI RNA scaffold sequence
cgggaggggcaacucucccgcuuuuuu

SEQ ID NO: 960 - RNA, 21 nt, Artificial Sequence
  OMNI RNA scaffold sequence
cgggaggggcaacucucccgc

SEQ ID NO: 961 - RNA, 90 nt, Artificial Sequence
  OMNI RNA scaffold sequence
guugugauuugcuuuagaaauaagcaaaucacaauaaggauuuuauccguugugaaaacauuucgggaggggcaacucucccgcuuuuuu

SEQ ID NO: 962 - RNA, 90 nt, Artificial Sequence
  OMNI RNA scaffold sequence
guugugauuugcuuuagaaauaagcaaaucacaauaaggauucuauccguugugaaaacauuucgggaggggcaacucucccgcuuuuuu

SEQ ID NO: 963 - RNA, 15 nt, Artificial Sequence
  OMNI RNA scaffold sequence
aaggauucuauccgu

SEQ ID NO: 964 - RNA, 16 nt, Artificial Sequence
  OMNI RNA scaffold sequence
guugugauuugcuuug

SEQ ID NO: 965 - RNA, 15 nt, Artificial Sequence
  OMNI RNA scaffold sequence
guugugauuugcuuu

SEQ ID NO: 966 - RNA, 12 nt, Artificial Sequence
  OMNI RNA scaffold sequence
guugugauuugc

SEQ ID NO: 967 - RNA, 10 nt, Artificial Sequence
  OMNI RNA scaffold sequence
guugugauuu

SEQ ID NO: 968 - RNA, 16 nt, Artificial Sequence
  OMNI RNA scaffold sequence
caaagcaaaucacaau

SEQ ID NO: 969 - RNA, 16 nt, Artificial Sequence
  OMNI RNA scaffold sequence
aaagcaaaucacaaua

SEQ ID NO: 970 - RNA, 13 nt, Artificial Sequence
  OMNI RNA scaffold sequence
gcaaaucacaaua

SEQ ID NO: 971 - RNA, 11 nt, Artificial Sequence
  OMNI RNA scaffold sequence
aaaucacaaua

SEQ ID NO: 972 - RNA, 14 nt, Artificial Sequence
  OMNI RNA scaffold sequence
aaggauuauuccgu

SEQ ID NO: 973 - RNA, 10 nt, Artificial Sequence
  OMNI RNA scaffold sequence
ggauuauucc

SEQ ID NO: 974 - RNA, 14 nt, Artificial Sequence
  OMNI RNA scaffold sequence
ugugaaaacaucug

SEQ ID NO: 975 - RNA, 39 nt, Artificial Sequence
  OMNI RNA scaffold sequence
gagagggaugaccuugcgguugucucucucgucuuuuuu

SEQ ID NO: 976 - RNA, 33 nt, Artificial Sequence
  OMNI RNA scaffold sequence
gagagggaugaccuugcgguugucucucucguc

SEQ ID NO: 977 - RNA, 103 nt, Artificial Sequence
  OMNI RNA scaffold sequence
guugugauuugcuuuggaaacaaagcaaaucacaauaaggauuauuccguugugaaaacaucuggagagggaugaccuugcgguugucucucucgucuuuuuu

SEQ ID NO: 978 - RNA, 19 nt, Artificial Sequence
  OMNI RNA scaffold sequence
guuguggauugcacgcaaa

SEQ ID NO: 979 - RNA, 15 nt, Artificial Sequence
  OMNI RNA scaffold sequence
guuguggauugcacg

SEQ ID NO: 980 - RNA, 12 nt, Artificial Sequence
  OMNI RNA scaffold sequence
guuguggauugc

SEQ ID NO: 981 - RNA, 10 nt, Artificial Sequence
  OMNI RNA scaffold sequence
guuguggauu

SEQ ID NO: 982 - RNA, 17 nt, Artificial Sequence
  OMNI RNA scaffold sequence
ugugugcuuuacacaac

SEQ ID NO: 983 - RNA, 16 nt, Artificial Sequence
  OMNI RNA scaffold sequence
ugugcuuuacacaaca

SEQ ID NO: 984 - RNA, 13 nt, Artificial Sequence
  OMNI RNA scaffold sequence
gcuuuacacaaca

SEQ ID NO: 985 - RNA, 11 nt, Artificial Sequence
  OMNI RNA scaffold sequence
uuuacacaaca

SEQ ID NO: 986 - RNA, 15 nt, Artificial Sequence
  OMNI RNA scaffold sequence
aaggcuauaagccgu

SEQ ID NO: 987 - RNA, 11 nt, Artificial Sequence
  OMNI RNA scaffold sequence
ggcuauaagcc

SEQ ID NO: 988 - RNA, 11 nt, Artificial Sequence
  OMNI RNA scaffold sequence
agauuuuucuc

SEQ ID NO: 989 - RNA, 27 nt, Artificial Sequence
  OMNI RNA scaffold sequence
aaucccgcguacuccgugggauuuuuu

SEQ ID NO: 990 - RNA, 21 nt, Artificial Sequence
  OMNI RNA scaffold sequence
aaucccgcguacuccguggga

SEQ ID NO: 991 - RNA, 93 nt, Artificial Sequence
  OMNI RNA scaffold sequence
guuguggauugcacgcaaagaaaugugugcuuuacacaacaaggcuauaagccguagauuuuucucaaucccgcguacuccgugggauuuuuu

SEQ ID NO: 992 - RNA, 93 nt, Artificial Sequence
  OMNI RNA scaffold sequence
guuguggauugcacgcaaagaaaugugugcuuuacacaacaaggcuauaagccguagauucuucucaaucccgcguacuccgugggauuuuuu

SEQ ID NO: 993 - RNA, 11 nt, Artificial Sequence
  OMNI RNA scaffold sequence
agauucuucuc

SEQ ID NO: 994 - RNA, 19 nt, Artificial Sequence
  OMNI RNA scaffold sequence
guugugguuugaugaugau

SEQ ID NO: 995 - RNA, 15 nt, Artificial Sequence
  OMNI RNA scaffold sequence
guugugguuugauga

SEQ ID NO: 996 - RNA, 12 nt, Artificial Sequence
  OMNI RNA scaffold sequence
guugugguuuga

SEQ ID NO: 997 - RNA, 10 nt, Artificial Sequence
  OMNI RNA scaffold sequence
guugugguuu

SEQ ID NO: 998 - RNA, 19 nt, Artificial Sequence
  OMNI RNA scaffold sequence
aucaucaucuuaucacaau

SEQ ID NO: 999 - RNA, 16 nt, Artificial Sequence
  OMNI RNA scaffold sequence
ucaucuuaucacaaua

SEQ ID NO: 1000 - RNA, 13 nt, Artificial Sequence
  OMNI RNA scaffold sequence
ucuuaucacaaua

SEQ ID NO: 1001 - RNA, 11 nt, Artificial Sequence
  OMNI RNA scaffold sequence
uuaucacaaua

SEQ ID NO: 1002 - RNA, 13 nt, Artificial Sequence
  OMNI RNA scaffold sequence
aaggcuauaugcc

SEQ ID NO: 1003 - RNA, 11 nt, Artificial Sequence
  OMNI RNA scaffold sequence
ggcuauaugcc

SEQ ID NO: 1004 - RNA, 17 nt, Artificial Sequence
  OMNI RNA scaffold sequence
gaagguauuaaccuuuu

SEQ ID NO: 1005 - RNA, 28 nt, Artificial Sequence
  OMNI RNA scaffold sequence
gccucucuucuggagaggcuuauuuuuu

SEQ ID NO: 1006 - RNA, 22 nt, Artificial Sequence
  OMNI RNA scaffold sequence
gccucucuucuggagaggcuua

SEQ ID NO: 1007 - RNA, 100 nt, Artificial Sequence
  OMNI RNA scaffold sequence
guugugguuugaugaugaugaaaaucaucaucuuaucacaauaaggcuauaugccgaagguauuaaccuuuugccucucuucuggagaggcuuauuuuuu

SEQ ID NO: 1008 - RNA, 100 nt, Artificial Sequence
  OMNI RNA scaffold sequence
guugugguuugaugaugaugaaaaucaucaucuuaucacaauaaggcuauaugccgaagguauuaaccuuucgccucucuucuggagaggcuuauuuuuu

SEQ ID NO: 1009 - RNA, 17 nt, Artificial Sequence
  OMNI RNA scaffold sequence
gaagguauuaaccuuuc

SEQ ID NO: 1010 - RNA, 19 nt, Artificial Sequence
  OMNI RNA scaffold sequence
guugugguuugauguagga

SEQ ID NO: 1011 - RNA, 15 nt, Artificial Sequence
  OMNI RNA scaffold sequence
guugugguuugaugu

SEQ ID NO: 1012 - RNA, 12 nt, Artificial Sequence
  OMNI RNA scaffold sequence
guugugguuuga

SEQ ID NO: 1013 - RNA, 10 nt, Artificial Sequence
  OMNI RNA scaffold sequence
guugugguuu

SEQ ID NO: 1014 - RNA, 19 nt, Artificial Sequence
  OMNI RNA scaffold sequence
uccuacaucuuaucacaau

SEQ ID NO: 1015 - RNA, 16 nt, Artificial Sequence
  OMNI RNA scaffold sequence
acaucuuaucacaaua

SEQ ID NO: 1016 - RNA, 13 nt, Artificial Sequence
  OMNI RNA scaffold sequence
ucuuaucacaaua

SEQ ID NO: 1017 - RNA, 11 nt, Artificial Sequence
  OMNI RNA scaffold sequence
uuaucacaaua

SEQ ID NO: 1018 - RNA, 17 nt, Artificial Sequence
  OMNI RNA scaffold sequence
aaggccauuauggccga

SEQ ID NO: 1019 - RNA, 13 nt, Artificial Sequence
  OMNI RNA scaffold sequence
ggccauuauggcc

SEQ ID NO: 1020 - RNA, 14 nt, Artificial Sequence
  OMNI RNA scaffold sequence
aggguaaaaccuac

SEQ ID NO: 1021 - RNA, 26 nt, Artificial Sequence
  OMNI RNA scaffold sequence
gcucccgcuucggugggagcuuuuuu

SEQ ID NO: 1022 - RNA, 20 nt, Artificial Sequence
  OMNI RNA scaffold sequence
gcucccgcuucggugggagc

SEQ ID NO: 1023 - RNA, 99 nt, Artificial Sequence
  OMNI RNA scaffold sequence
guugugguuugauguaggagaaauccuacaucuuaucacaauaaggccauuauggccgaaggguaaaaccuacgcucccgcuucggugggagcuuuuuu

SEQ ID NO: 1024 - RNA, 16 nt, Artificial Sequence
  OMNI RNA scaffold sequence
guuguguauaucacuc

SEQ ID NO: 1025 - RNA, 15 nt, Artificial Sequence
  OMNI RNA scaffold sequence
guuguguauaucacu

SEQ ID NO: 1026 - RNA, 12 nt, Artificial Sequence
  OMNI RNA scaffold sequence
guuguguauauc

SEQ ID NO: 1027 - RNA, 10 nt, Artificial Sequence
  OMNI RNA scaffold sequence
guuguguaua

SEQ ID NO: 1028 - RNA, 16 nt, Artificial Sequence
  OMNI RNA scaffold sequence
gagugauauacacaau

SEQ ID NO: 1029 - RNA, 16 nt, Artificial Sequence
  OMNI RNA scaffold sequence
agugauauacacaaua

SEQ ID NO: 1030 - RNA, 13 nt, Artificial Sequence
  OMNI RNA scaffold sequence
gauauacacaaua

SEQ ID NO: 1031 - RNA, 11 nt, Artificial Sequence
  OMNI RNA scaffold sequence
uauacacaaua

SEQ ID NO: 1032 - RNA, 14 nt, Artificial Sequence
  OMNI RNA scaffold sequence
aaggauuauuccgu

SEQ ID NO: 1033 - RNA, 10 nt, Artificial Sequence
  OMNI RNA scaffold sequence
ggauuauucc

SEQ ID NO: 1034 - RNA, 13 nt, Artificial Sequence
  OMNI RNA scaffold sequence
uguguaaacauuc

SEQ ID NO: 1035 - RNA, 38 nt, Artificial Sequence
  OMNI RNA scaffold sequence
agggugggacauugcuagacagugucucgcccuuuuuu

SEQ ID NO: 1036 - RNA, 32 nt, Artificial Sequence
  OMNI RNA scaffold sequence
agggugggacauugcuagacagugucucgccc

SEQ ID NO: 1037 - RNA, 101 nt, Artificial Sequence
  OMNI RNA scaffold sequence
guuguguauaucacucgaaagagugauauacacaauaaggauuauuccguuguguaaacauucagggugggacauugcuagacagugucucgcccuuuuuu

SEQ ID NO: 1038 - RNA, 16 nt, Artificial Sequence
  OMNI RNA scaffold sequence
guuguguauaucacuc

SEQ ID NO: 1039 - RNA, 15 nt, Artificial Sequence
  OMNI RNA scaffold sequence
guuguguauaucacu

SEQ ID NO: 1040 - RNA, 12 nt, Artificial Sequence
  OMNI RNA scaffold sequence
guuguguauauc

SEQ ID NO: 1041 - RNA, 10 nt, Artificial Sequence
  OMNI RNA scaffold sequence
guuguguaua

SEQ ID NO: 1042 - RNA, 16 nt, Artificial Sequence
  OMNI RNA scaffold sequence
gagugauauacacaau

SEQ ID NO: 1043 - RNA, 16 nt, Artificial Sequence
  OMNI RNA scaffold sequence
agugauauacacaaua

SEQ ID NO: 1044 - RNA, 13 nt, Artificial Sequence
  OMNI RNA scaffold sequence
gauauacacaaua

SEQ ID NO: 1045 - RNA, 11 nt, Artificial Sequence
  OMNI RNA scaffold sequence
uauacacaaua

SEQ ID NO: 1046 - RNA, 14 nt, Artificial Sequence
  OMNI RNA scaffold sequence
aaggauuauuccgu

SEQ ID NO: 1047 - RNA, 10 nt, Artificial Sequence
  OMNI RNA scaffold sequence
ggauuauucc

SEQ ID NO: 1048 - RNA, 13 nt, Artificial Sequence
  OMNI RNA scaffold sequence
uguguaaacauuc

SEQ ID NO: 1049 - RNA, 38 nt, Artificial Sequence
  OMNI RNA scaffold sequence
agggugggacauugcuggacagugucucgcccuuuuuu

SEQ ID NO: 1050 - RNA, 32 nt, Artificial Sequence
  OMNI RNA scaffold sequence
agggugggacauugcuggacagugucucgccc

SEQ ID NO: 1051 - RNA, 101 nt, Artificial Sequence
  OMNI RNA scaffold sequence
guuguguauaucacucgaaagagugauauacacaauaaggauuauuccguuguguaaacauucagggugggacauugcuggacagugucucgcccuuuuuu

SEQ ID NO: 1052 - RNA, 17 nt, Artificial Sequence
  OMNI RNA scaffold sequence
guuugagagccuuguua

SEQ ID NO: 1053 - RNA, 15 nt, Artificial Sequence
  OMNI RNA scaffold sequence
guuugagagccuugu

SEQ ID NO: 1054 - RNA, 12 nt, Artificial Sequence
  OMNI RNA scaffold sequence
guuugagagccu

SEQ ID NO: 1055 - RNA, 10 nt, Artificial Sequence
  OMNI RNA scaffold sequence
guuugagagc

SEQ ID NO: 1056 - RNA, 19 nt, Artificial Sequence
  OMNI RNA scaffold sequence
uaacaaggcgagugcaaau

SEQ ID NO: 1057 - RNA, 18 nt, Artificial Sequence
  OMNI RNA scaffold sequence
acaaggcgagugcaaaua

SEQ ID NO: 1058 - RNA, 15 nt, Artificial Sequence
  OMNI RNA scaffold sequence
aggcgagugcaaaua

SEQ ID NO: 1059 - RNA, 13 nt, Artificial Sequence
  OMNI RNA scaffold sequence
gcgagugcaaaua

SEQ ID NO: 1060 - RNA, 15 nt, Artificial Sequence
  OMNI RNA scaffold sequence
aaggauaaauccgau

SEQ ID NO: 1061 - RNA, 10 nt, Artificial Sequence
  OMNI RNA scaffold sequence
ggauaaaucc

SEQ ID NO: 1062 - RNA, 45 nt, Artificial Sequence
  OMNI RNA scaffold sequence
aucgcuuuugaguccgcauggugcggcuaaaaggaucuguuuuuu

SEQ ID NO: 1063 - RNA, 39 nt, Artificial Sequence
  OMNI RNA scaffold sequence
aucgcuuuugaguccgcauggugcggcuaaaaggaucug

SEQ ID NO: 1064 - RNA, 100 nt, Artificial Sequence
  OMNI RNA scaffold sequence
guuugagagccuuguuagaaauaacaaggcgagugcaaauaaggauaaauccgauaucgcuuuugaguccgcauggugcggcuaaaaggaucuguuuuuu

SEQ ID NO: 1065 - RNA, 100 nt, Artificial Sequence
  OMNI RNA scaffold sequence
guuugagagccuuguuagaaauaacaaggcgagugcaaauaaggauaaauccgauaucgcuucugaguccgcauggugcggcuagaaggaucuguuuuuu

SEQ ID NO: 1066 - RNA, 45 nt, Artificial Sequence
  OMNI RNA scaffold sequence
aucgcuucugaguccgcauggugcggcuagaaggaucuguuuuuu

SEQ ID NO: 1067 - RNA, 39 nt, Artificial Sequence
  OMNI RNA scaffold sequence
aucgcuucugaguccgcauggugcggcuagaaggaucug

SEQ ID NO: 1068 - RNA, 17 nt, Artificial Sequence
  OMNI RNA scaffold sequence
guuugagagccuuguua

SEQ ID NO: 1069 - RNA, 15 nt, Artificial Sequence
  OMNI RNA scaffold sequence
guuugagagccuugu

SEQ ID NO: 1070 - RNA, 12 nt, Artificial Sequence
  OMNI RNA scaffold sequence
guuugagagccu

SEQ ID NO: 1071 - RNA, 10 nt, Artificial Sequence
  OMNI RNA scaffold sequence
guuugagagc

SEQ ID NO: 1072 - RNA, 19 nt, Artificial Sequence
  OMNI RNA scaffold sequence
uaacaaggcaaguucaaau

SEQ ID NO: 1073 - RNA, 18 nt, Artificial Sequence
  OMNI RNA scaffold sequence
acaaggcaaguucaaaua

SEQ ID NO: 1074 - RNA, 15 nt, Artificial Sequence
  OMNI RNA scaffold sequence
aggcaaguucaaaua

SEQ ID NO: 1075 - RNA, 13 nt, Artificial Sequence
  OMNI RNA scaffold sequence
gcaaguucaaaua

SEQ ID NO: 1076 - RNA, 36 nt, Artificial Sequence
  OMNI RNA scaffold sequence
aaaacuuuugucugaucauuuugucgcauuggcgau

SEQ ID NO: 1077 - RNA, 30 nt, Artificial Sequence
  OMNI RNA scaffold sequence
ugcucuucucauaugagaggagcauuuuuu

SEQ ID NO: 1078 - RNA, 24 nt, Artificial Sequence
  OMNI RNA scaffold sequence
ugcucuucucauaugagaggagca

SEQ ID NO: 1079 - RNA, 106 nt, Artificial Sequence
  OMNI RNA scaffold sequence
guuugagagccuuguuagaaauaacaaggcaaguucaaauaaaacuuuugucugaucauuuugucgcauuggcgauugcucuucucauaugagaggagcauuuuuu

SEQ ID NO: 1080 - RNA, 106 nt, Artificial Sequence
  OMNI RNA scaffold sequence
guuugagagccuuguuagaaauaacaaggcaaguucaaauaaaacuucugucugaucauucugucgcauuggcgauugcucuucucauaugagaggagcauuuuuu

SEQ ID NO: 1081 - RNA, 36 nt, Artificial Sequence
  OMNI RNA scaffold sequence
aaaacuucugucugaucauucugucgcauuggcgau

SEQ ID NO: 1082 - RNA, 17 nt, Artificial Sequence
  OMNI RNA scaffold sequence
guuugagagcuuuguua

SEQ ID NO: 1083 - RNA, 15 nt, Artificial Sequence
  OMNI RNA scaffold sequence
guuugagagcuuugu

SEQ ID NO: 1084 - RNA, 12 nt, Artificial Sequence
  OMNI RNA scaffold sequence
guuugagagcuu

SEQ ID NO: 1085 - RNA, 10 nt, Artificial Sequence
  OMNI RNA scaffold sequence
guuugagagc

SEQ ID NO: 1086 - RNA, 19 nt, Artificial Sequence
  OMNI RNA scaffold sequence
uaacaaagcgagugcaaau

SEQ ID NO: 1087 - RNA, 18 nt, Artificial Sequence
  OMNI RNA scaffold sequence
acaaagcgagugcaaaua

SEQ ID NO: 1088 - RNA, 15 nt, Artificial Sequence
  OMNI RNA scaffold sequence
aagcgagugcaaaua

SEQ ID NO: 1089 - RNA, 13 nt, Artificial Sequence
  OMNI RNA scaffold sequence
gcgagugcaaaua

SEQ ID NO: 1090 - RNA, 17 nt, Artificial Sequence
  OMNI RNA scaffold sequence
aagauuauucgaaaucg

SEQ ID NO: 1091 - RNA, 14 nt, Artificial Sequence
  OMNI RNA scaffold sequence
gauuauucgaaauc

SEQ ID NO: 1092 - RNA, 10 nt, Artificial Sequence
  OMNI RNA scaffold sequence
ccuauacgga

SEQ ID NO: 1093 - RNA, 20 nt, Artificial Sequence
  OMNI RNA scaffold sequence
ccgcauugugcggauuuuuu

SEQ ID NO: 1094 - RNA, 14 nt, Artificial Sequence
  OMNI RNA scaffold sequence
ccgcauugugcgga

SEQ ID NO: 1095 - RNA, 87 nt, Artificial Sequence
  OMNI RNA scaffold sequence
guuugagagcuuuguuagaaauaacaaagcgagugcaaauaagauuauucgaaaucgccuauacggaccgcauugugcggauuuuuu

SEQ ID NO: 1096 - RNA, 17 nt, Artificial Sequence
  OMNI RNA scaffold sequence
guuugagaguaauguag

SEQ ID NO: 1097 - RNA, 15 nt, Artificial Sequence
  OMNI RNA scaffold sequence
guuugagaguaaugu

SEQ ID NO: 1098 - RNA, 12 nt, Artificial Sequence
  OMNI RNA scaffold sequence
guuugagaguaa

SEQ ID NO: 1099 - RNA, 10 nt, Artificial Sequence
  OMNI RNA scaffold sequence
guuugagagu

SEQ ID NO: 1100 - RNA, 19 nt, Artificial Sequence
  OMNI RNA scaffold sequence
uuacauuacaaguucaaau

SEQ ID NO: 1101 - RNA, 18 nt, Artificial Sequence
  OMNI RNA scaffold sequence
acauuacaaguucaaaua

SEQ ID NO: 1102 - RNA, 15 nt, Artificial Sequence
  OMNI RNA scaffold sequence
uuacaaguucaaaua

SEQ ID NO: 1103 - RNA, 13 nt, Artificial Sequence
  OMNI RNA scaffold sequence
acaaguucaaaua

SEQ ID NO: 1104 - RNA, 18 nt, Artificial Sequence
  OMNI RNA scaffold sequence
aacgauuuaaucgaaacc

SEQ ID NO: 1105 - RNA, 11 nt, Artificial Sequence
  OMNI RNA scaffold sequence
cgauuuaaucg

SEQ ID NO: 1106 - RNA, 12 nt, Artificial Sequence
  OMNI RNA scaffold sequence
accuuuuuaggu

SEQ ID NO: 1107 - RNA, 19 nt, Artificial Sequence
  OMNI RNA scaffold sequence
acugcgguugcaguuuuuu

SEQ ID NO: 1108 - RNA, 13 nt, Artificial Sequence
  OMNI RNA scaffold sequence
acugcgguugcag

SEQ ID NO: 1109 - RNA, 89 nt, Artificial Sequence
  OMNI RNA scaffold sequence
guuugagaguaauguaggaaauuacauuacaaguucaaauaacgauuuaaucgaaaccaccuuuuuagguacugcgguugcaguuuuuu

SEQ ID NO: 1110 - RNA, 89 nt, Artificial Sequence
  OMNI RNA scaffold sequence
guuugagaguaauguaggaaauuacauuacaaguucaaauaacgauuuaaucgaaaccaccuuucuagguacugcgguugcaguuuuuu

SEQ ID NO: 1111 - RNA, 12 nt, Artificial Sequence
  OMNI RNA scaffold sequence
accuuucuaggu

SEQ ID NO: 1112 - RNA, 17 nt, Artificial Sequence
  OMNI RNA scaffold sequence
guuugagaguaguguaa

SEQ ID NO: 1113 - RNA, 15 nt, Artificial Sequence
  OMNI RNA scaffold sequence
guuugagaguagugu

SEQ ID NO: 1114 - RNA, 12 nt, Artificial Sequence
  OMNI RNA scaffold sequence
guuugagaguag

SEQ ID NO: 1115 - RNA, 10 nt, Artificial Sequence
  OMNI RNA scaffold sequence
guuugagagu

SEQ ID NO: 1116 - RNA, 21 nt, Artificial Sequence
  OMNI RNA scaffold sequence
uuacacauuacgaguucaaau

SEQ ID NO: 1117 - RNA, 20 nt, Artificial Sequence
  OMNI RNA scaffold sequence
acacauuacgaguucaaaua

SEQ ID NO: 1118 - RNA, 17 nt, Artificial Sequence
  OMNI RNA scaffold sequence
cauuacgaguucaaaua

SEQ ID NO: 1119 - RNA, 13 nt, Artificial Sequence
  OMNI RNA scaffold sequence
acgaguucaaaua

SEQ ID NO: 1120 - RNA, 15 nt, Artificial Sequence
  OMNI RNA scaffold sequence
aacgauuaaaucgaa

SEQ ID NO: 1121 - RNA, 11 nt, Artificial Sequence
  OMNI RNA scaffold sequence
cgauuaaaucg

SEQ ID NO: 1122 - RNA, 14 nt, Artificial Sequence
  OMNI RNA scaffold sequence
accaccuauauggu

SEQ ID NO: 1123 - RNA, 19 nt, Artificial Sequence
  OMNI RNA scaffold sequence
acugcgguugcaguuuuuu

SEQ ID NO: 1124 - RNA, 13 nt, Artificial Sequence
  OMNI RNA scaffold sequence
acugcgguugcag

SEQ ID NO: 1125 - RNA, 90 nt, Artificial Sequence
  OMNI RNA scaffold sequence
guuugagaguaguguaagaaauuacacauuacgaguucaaauaacgauuaaaucgaaaccaccuauaugguacugcgguugcaguuuuuu

SEQ ID NO: 1126 - RNA, 17 nt, Artificial Sequence
  OMNI RNA scaffold sequence
guuugagaguaguguaa

SEQ ID NO: 1127 - RNA, 15 nt, Artificial Sequence
  OMNI RNA scaffold sequence
guuugagaguagugu

SEQ ID NO: 1128 - RNA, 12 nt, Artificial Sequence
  OMNI RNA scaffold sequence
guuugagaguag

SEQ ID NO: 1129 - RNA, 10 nt, Artificial Sequence
  OMNI RNA scaffold sequence
guuugagagu

SEQ ID NO: 1130 - RNA, 19 nt, Artificial Sequence
  OMNI RNA scaffold sequence
uuacacuacaaguucaaau

SEQ ID NO: 1131 - RNA, 18 nt, Artificial Sequence
  OMNI RNA scaffold sequence
acacuacaaguucaaaua

SEQ ID NO: 1132 - RNA, 15 nt, Artificial Sequence
  OMNI RNA scaffold sequence
cuacaaguucaaaua

SEQ ID NO: 1133 - RNA, 13 nt, Artificial Sequence
  OMNI RNA scaffold sequence
acaaguucaaaua

SEQ ID NO: 1134 - RNA, 31 nt, Artificial Sequence
  OMNI RNA scaffold sequence
aaaguaauguuaucacccauuuauuugggau

SEQ ID NO: 1135 - RNA, 15 nt, Artificial Sequence
  OMNI RNA scaffold sequence
acugcgugcgcaguu

SEQ ID NO: 1136 - RNA, 24 nt, Artificial Sequence
  OMNI RNA scaffold sequence
gacucgcucaagcgagucuuuuuu

SEQ ID NO: 1137 - RNA, 18 nt, Artificial Sequence
  OMNI RNA scaffold sequence
gacucgcucaagcgaguc

SEQ ID NO: 1138 - RNA, 110 nt, Artificial Sequence
  OMNI RNA scaffold sequence
guuugagaguaguguaagaaauuacacuacaaguucaaauaaaguaauguuaucacccauuuauuugggauacugcgugcgcaguugacucgcucaagcgagucuuuuuu

SEQ ID NO: 1139 - RNA, 17 nt, Artificial Sequence
  OMNI RNA scaffold sequence
guuugagaguaguguaa

SEQ ID NO: 1140 - RNA, 15 nt, Artificial Sequence
  OMNI RNA scaffold sequence
guuugagaguagugu

SEQ ID NO: 1141 - RNA, 12 nt, Artificial Sequence
  OMNI RNA scaffold sequence
guuugagaguag

SEQ ID NO: 1142 - RNA, 10 nt, Artificial Sequence
  OMNI RNA scaffold sequence
guuugagagu

SEQ ID NO: 1143 - RNA, 19 nt, Artificial Sequence
  OMNI RNA scaffold sequence
uuacacuacgaguucaaau

SEQ ID NO: 1144 - RNA, 18 nt, Artificial Sequence
  OMNI RNA scaffold sequence
acacuacgaguucaaaua

SEQ ID NO: 1145 - RNA, 15 nt, Artificial Sequence
  OMNI RNA scaffold sequence
cuacgaguucaaaua

SEQ ID NO: 1146 - RNA, 13 nt, Artificial Sequence
  OMNI RNA scaffold sequence
acgaguucaaaua

SEQ ID NO: 1147 - RNA, 34 nt, Artificial Sequence
  OMNI RNA scaffold sequence
aaagaucauuccaaaucguucggcuuugccguuc

SEQ ID NO: 1148 - RNA, 21 nt, Artificial Sequence
  OMNI RNA scaffold sequence
gcacaaguguugugcuuuuuu

SEQ ID NO: 1149 - RNA, 15 nt, Artificial Sequence
  OMNI RNA scaffold sequence
gcacaaguguugugc

SEQ ID NO: 1150 - RNA, 95 nt, Artificial Sequence
  OMNI RNA scaffold sequence
guuugagaguaguguaagaaauuacacuacgaguucaaauaaagaucauuccaaaucguucggcuuugccguucgcacaaguguugugcuuuuuu

SEQ ID NO: 1151 - RNA, 17 nt, Artificial Sequence
  OMNI RNA scaffold sequence
guuugagaguaguguug

SEQ ID NO: 1152 - RNA, 15 nt, Artificial Sequence
  OMNI RNA scaffold sequence
guuugagaguagugu

SEQ ID NO: 1153 - RNA, 12 nt, Artificial Sequence
  OMNI RNA scaffold sequence
guuugagaguag

SEQ ID NO: 1154 - RNA, 10 nt, Artificial Sequence
  OMNI RNA scaffold sequence
guuugagagu

SEQ ID NO: 1155 - RNA, 20 nt, Artificial Sequence
  OMNI RNA scaffold sequence
cuagcacuacgaguucaaau

SEQ ID NO: 1156 - RNA, 18 nt, Artificial Sequence
  OMNI RNA scaffold sequence
gcacuacgaguucaaaua

SEQ ID NO: 1157 - RNA, 15 nt, Artificial Sequence
  OMNI RNA scaffold sequence
cuacgaguucaaaua

SEQ ID NO: 1158 - RNA, 13 nt, Artificial Sequence
  OMNI RNA scaffold sequence
acgaguucaaaua

SEQ ID NO: 1159 - RNA, 20 nt, Artificial Sequence
  OMNI RNA scaffold sequence
aaagauuuuucuaaaccuca

SEQ ID NO: 1160 - RNA, 10 nt, Artificial Sequence
  OMNI RNA scaffold sequence
agauuuuucu

SEQ ID NO: 1161 - RNA, 17 nt, Artificial Sequence
  OMNI RNA scaffold sequence
ggcacguuggugccacu

SEQ ID NO: 1162 - RNA, 23 nt, Artificial Sequence
  OMNI RNA scaffold sequence
agaaaugccauuaggcauuuuuu

SEQ ID NO: 1163 - RNA, 17 nt, Artificial Sequence
  OMNI RNA scaffold sequence
agaaaugccauuaggca

SEQ ID NO: 1164 - RNA, 101 nt, Artificial Sequence
  OMNI RNA scaffold sequence
guuugagaguaguguuggaaacuagcacuacgaguucaaauaaagauuuuucuaaaccucaggcacguuggugccacuagaaaugccauuaggcauuuuuu

SEQ ID NO: 1165 - RNA, 101 nt, Artificial Sequence
  OMNI RNA scaffold sequence
guuugagaguaguguuggaaacuagcacuacgaguucaaauaaagauucuucuaaaccucaggcacguuggugccacuagaaaugccauuaggcauuuuuu

SEQ ID NO: 1166 - RNA, 20 nt, Artificial Sequence
  OMNI RNA scaffold sequence
aaagauucuucuaaaccuca

SEQ ID NO: 1167 - RNA, 18 nt, Artificial Sequence
  OMNI RNA scaffold sequence
guuugagaguaguguugu

SEQ ID NO: 1168 - RNA, 15 nt, Artificial Sequence
  OMNI RNA scaffold sequence
guuugagaguagugu

SEQ ID NO: 1169 - RNA, 12 nt, Artificial Sequence
  OMNI RNA scaffold sequence
guuugagaguag

SEQ ID NO: 1170 - RNA, 10 nt, Artificial Sequence
  OMNI RNA scaffold sequence
guuugagagu

SEQ ID NO: 1171 - RNA, 19 nt, Artificial Sequence
  OMNI RNA scaffold sequence
auaacacuagaguucaaau

SEQ ID NO: 1172 - RNA, 17 nt, Artificial Sequence
  OMNI RNA scaffold sequence
acacuagaguucaaaua

SEQ ID NO: 1173 - RNA, 14 nt, Artificial Sequence
  OMNI RNA scaffold sequence
cuagaguucaaaua

SEQ ID NO: 1174 - RNA, 12 nt, Artificial Sequence
  OMNI RNA scaffold sequence
agaguucaaaua

SEQ ID NO: 1175 - RNA, 34 nt, Artificial Sequence
  OMNI RNA scaffold sequence
aaaaauuauuucaaaucauccggcaacuccggaa

SEQ ID NO: 1176 - RNA, 33 nt, Artificial Sequence
  OMNI RNA scaffold sequence
guacaguguguacauaauuaacccuucuuuuuu

SEQ ID NO: 1177 - RNA, 27 nt, Artificial Sequence
  OMNI RNA scaffold sequence
guacaguguguacauaauuaacccuuc

SEQ ID NO: 1178 - RNA, 108 nt, Artificial Sequence
  OMNI RNA scaffold sequence
guuugagaguaguguugugaaaauaacacuagaguucaaauaaaaauuauuucaaaucauccggcaacuccggaaguacaguguguacauaauuaacccuucuuuuuu

SEQ ID NO: 1179 - RNA, 17 nt, Artificial Sequence
  OMNI RNA scaffold sequence
guuugagaguauuguug

SEQ ID NO: 1180 - RNA, 15 nt, Artificial Sequence
  OMNI RNA scaffold sequence
guuugagaguauugu

SEQ ID NO: 1181 - RNA, 12 nt, Artificial Sequence
  OMNI RNA scaffold sequence
guuugagaguau

SEQ ID NO: 1182 - RNA, 10 nt, Artificial Sequence
  OMNI RNA scaffold sequence
guuugagagu

SEQ ID NO: 1183 - RNA, 19 nt, Artificial Sequence
  OMNI RNA scaffold sequence
caacaauacaaguucaaau

SEQ ID NO: 1184 - RNA, 18 nt, Artificial Sequence
  OMNI RNA scaffold sequence
acaauacaaguucaaaua

SEQ ID NO: 1185 - RNA, 15 nt, Artificial Sequence
  OMNI RNA scaffold sequence
auacaaguucaaaua

SEQ ID NO: 1186 - RNA, 13 nt, Artificial Sequence
  OMNI RNA scaffold sequence
acaaguucaaaua

SEQ ID NO: 1187 - RNA, 38 nt, Artificial Sequence
  OMNI RNA scaffold sequence
aaaaauuuauucuugucacuuaaucguauugacgaugc

SEQ ID NO: 1188 - RNA, 27 nt, Artificial Sequence
  OMNI RNA scaffold sequence
ggaaaucucucggaagagagauuuuuu

SEQ ID NO: 1189 - RNA, 21 nt, Artificial Sequence
  OMNI RNA scaffold sequence
ggaaaucucucggaagagaga

SEQ ID NO: 1190 - RNA, 105 nt, Artificial Sequence
  OMNI RNA scaffold sequence
guuugagaguauuguuggaaacaacaauacaaguucaaauaaaaauuuauucuugucacuuaaucguauugacgaugcggaaaucucucggaagagagauuuuuu

SEQ ID NO: 1191 - RNA, 17 nt, Artificial Sequence
  OMNI RNA scaffold sequence
guuugagaguauuguug

SEQ ID NO: 1192 - RNA, 15 nt, Artificial Sequence
  OMNI RNA scaffold sequence
guuugagaguauugu

SEQ ID NO: 1193 - RNA, 12 nt, Artificial Sequence
  OMNI RNA scaffold sequence
guuugagaguau

SEQ ID NO: 1194 - RNA, 10 nt, Artificial Sequence
  OMNI RNA scaffold sequence
guuugagagu

SEQ ID NO: 1195 - RNA, 19 nt, Artificial Sequence
  OMNI RNA scaffold sequence
caacaauacaaguucaaau

SEQ ID NO: 1196 - RNA, 18 nt, Artificial Sequence
  OMNI RNA scaffold sequence
acaauacaaguucaaaua

SEQ ID NO: 1197 - RNA, 15 nt, Artificial Sequence
  OMNI RNA scaffold sequence
auacaaguucaaaua

SEQ ID NO: 1198 - RNA, 13 nt, Artificial Sequence
  OMNI RNA scaffold sequence
acaaguucaaaua

SEQ ID NO: 1199 - RNA, 39 nt, Artificial Sequence
  OMNI RNA scaffold sequence
aaaaauuuauucuugucacuuaaucguauugacgaugcu

SEQ ID NO: 1200 - RNA, 26 nt, Artificial Sequence
  OMNI RNA scaffold sequence
gaaaucucucggaagagagauuuuuu

SEQ ID NO: 1201 - RNA, 20 nt, Artificial Sequence
  OMNI RNA scaffold sequence
gaaaucucucggaagagaga

SEQ ID NO: 1202 - RNA, 105 nt, Artificial Sequence
  OMNI RNA scaffold sequence
guuugagaguauuguuggaaacaacaauacaaguucaaauaaaaauuuauucuugucacuuaaucguauugacgaugcugaaaucucucggaagagagauuuuuu

SEQ ID NO: 1203 - RNA, 17 nt, Artificial Sequence
  OMNI RNA scaffold sequence
guuugagagucguguaa

SEQ ID NO: 1204 - RNA, 15 nt, Artificial Sequence
  OMNI RNA scaffold sequence
guuugagagucgugu

SEQ ID NO: 1205 - RNA, 12 nt, Artificial Sequence
  OMNI RNA scaffold sequence
guuugagagucg

SEQ ID NO: 1206 - RNA, 10 nt, Artificial Sequence
  OMNI RNA scaffold sequence
guuugagagu

SEQ ID NO: 1207 - RNA, 19 nt, Artificial Sequence
  OMNI RNA scaffold sequence
uuacacgacaaguucaaau

SEQ ID NO: 1208 - RNA, 18 nt, Artificial Sequence
  OMNI RNA scaffold sequence
acacgacaaguucaaaua

SEQ ID NO: 1209 - RNA, 15 nt, Artificial Sequence
  OMNI RNA scaffold sequence
cgacaaguucaaaua

SEQ ID NO: 1210 - RNA, 13 nt, Artificial Sequence
  OMNI RNA scaffold sequence
acaaguucaaaua

SEQ ID NO: 1211 - RNA, 42 nt, Artificial Sequence
  OMNI RNA scaffold sequence
aagcuuaguggcaucugacuuuagcugcuauuuagcgacuuc

SEQ ID NO: 1212 - RNA, 15 nt, Artificial Sequence
  OMNI RNA scaffold sequence
accgcucuugcgguu

SEQ ID NO: 1213 - RNA, 21 nt, Artificial Sequence
  OMNI RNA scaffold sequence
agccccguguggggcuuuuuu

SEQ ID NO: 1214 - RNA, 15 nt, Artificial Sequence
  OMNI RNA scaffold sequence
agccccguguggggc

SEQ ID NO: 1215 - RNA, 118 nt, Artificial Sequence
  OMNI RNA scaffold sequence
guuugagagucguguaagaaauuacacgacaaguucaaauaagcuuaguggcaucugacuuuagcugcuauuuagcgacuucaccgcucuugcgguuagccccguguggggcuuuuuu

SEQ ID NO: 1216 - RNA, 17 nt, Artificial Sequence
  OMNI RNA scaffold sequence
guuugagagucuuguua

SEQ ID NO: 1217 - RNA, 15 nt, Artificial Sequence
  OMNI RNA scaffold sequence
guuugagagucuugu

SEQ ID NO: 1218 - RNA, 12 nt, Artificial Sequence
  OMNI RNA scaffold sequence
guuugagagucu

SEQ ID NO: 1219 - RNA, 10 nt, Artificial Sequence
  OMNI RNA scaffold sequence
guuugagagu

SEQ ID NO: 1220 - RNA, 19 nt, Artificial Sequence
  OMNI RNA scaffold sequence
uaauaagacgaguucaaau

SEQ ID NO: 1221 - RNA, 18 nt, Artificial Sequence
  OMNI RNA scaffold sequence
auaagacgaguucaaaua

SEQ ID NO: 1222 - RNA, 15 nt, Artificial Sequence
  OMNI RNA scaffold sequence
agacgaguucaaaua

SEQ ID NO: 1223 - RNA, 13 nt, Artificial Sequence
  OMNI RNA scaffold sequence
acgaguucaaaua

SEQ ID NO: 1224 - RNA, 37 nt, Artificial Sequence
  OMNI RNA scaffold sequence
aaaaauuuauucugaucacuuaucgcauuugcgguga

SEQ ID NO: 1225 - RNA, 34 nt, Artificial Sequence
  OMNI RNA scaffold sequence
aauaaacucccgaacaagcgggaguuuauuuuuu

SEQ ID NO: 1226 - RNA, 28 nt, Artificial Sequence
  OMNI RNA scaffold sequence
aauaaacucccgaacaagcgggaguuua

SEQ ID NO: 1227 - RNA, 111 nt, Artificial Sequence
  OMNI RNA scaffold sequence
guuugagagucuuguuagaaauaauaagacgaguucaaauaaaaauuuauucugaucacuuaucgcauuugcggugaaauaaacucccgaacaagcgggaguuuauuuuuu

SEQ ID NO: 1228 - RNA, 17 nt, Artificial Sequence
  OMNI RNA scaffold sequence
guuugagaguuauguua

SEQ ID NO: 1229 - RNA, 15 nt, Artificial Sequence
  OMNI RNA scaffold sequence
guuugagaguuaugu

SEQ ID NO: 1230 - RNA, 12 nt, Artificial Sequence
  OMNI RNA scaffold sequence
guuugagaguua

SEQ ID NO: 1231 - RNA, 10 nt, Artificial Sequence
  OMNI RNA scaffold sequence
guuugagagu

SEQ ID NO: 1232 - RNA, 19 nt, Artificial Sequence
  OMNI RNA scaffold sequence
uaacauaacgaguucaaau

SEQ ID NO: 1233 - RNA, 18 nt, Artificial Sequence
  OMNI RNA scaffold sequence
acauaacgaguucaaaua

SEQ ID NO: 1234 - RNA, 15 nt, Artificial Sequence
  OMNI RNA scaffold sequence
uaacgaguucaaaua

SEQ ID NO: 1235 - RNA, 13 nt, Artificial Sequence
  OMNI RNA scaffold sequence
acgaguucaaaua

SEQ ID NO: 1236 - RNA, 37 nt, Artificial Sequence
  OMNI RNA scaffold sequence
aaauguuauucuaagcauucuucagcgugaagagcau

SEQ ID NO: 1237 - RNA, 14 nt, Artificial Sequence
  OMNI RNA scaffold sequence
uguuauucuaagca

SEQ ID NO: 1238 - RNA, 21 nt, Artificial Sequence
  OMNI RNA scaffold sequence
gaaaaggcgaaagccuuuuuu

SEQ ID NO: 1239 - RNA, 15 nt, Artificial Sequence
  OMNI RNA scaffold sequence
gaaaaggcgaaagcc

SEQ ID NO: 1240 - RNA, 98 nt, Artificial Sequence
  OMNI RNA scaffold sequence
guuugagaguuauguuagaaauaacauaacgaguucaaauaaauguuauucuaagcauucuucagcgugaagagcaugaaaaggcgaaagccuuuuuu

SEQ ID NO: 1241 - RNA, 16 nt, Artificial Sequence
  OMNI RNA scaffold sequence
guuugaguguaaugua

SEQ ID NO: 1242 - RNA, 15 nt, Artificial Sequence
  OMNI RNA scaffold sequence
guuugaguguaaugu

SEQ ID NO: 1243 - RNA, 12 nt, Artificial Sequence
  OMNI RNA scaffold sequence
guuugaguguaa

SEQ ID NO: 1244 - RNA, 10 nt, Artificial Sequence
  OMNI RNA scaffold sequence
guuugagugu

SEQ ID NO: 1245 - RNA, 19 nt, Artificial Sequence
  OMNI RNA scaffold sequence
uacauuacaaaguucaaau

SEQ ID NO: 1246 - RNA, 19 nt, Artificial Sequence
  OMNI RNA scaffold sequence
acauuacaaaguucaaaua

SEQ ID NO: 1247 - RNA, 16 nt, Artificial Sequence
  OMNI RNA scaffold sequence
uuacaaaguucaaaua

SEQ ID NO: 1248 - RNA, 14 nt, Artificial Sequence
  OMNI RNA scaffold sequence
acaaaguucaaaua

SEQ ID NO: 1249 - RNA, 20 nt, Artificial Sequence
  OMNI RNA scaffold sequence
aagcuuuaagcgaaaucaua

SEQ ID NO: 1250 - RNA, 25 nt, Artificial Sequence
  OMNI RNA scaffold sequence
gagaagcagugcuucucauuuuuuu

SEQ ID NO: 1251 - RNA, 18 nt, Artificial Sequence
  OMNI RNA scaffold sequence
gagaagcagugcuucuca

SEQ ID NO: 1252 - RNA, 84 nt, Artificial Sequence
  OMNI RNA scaffold sequence
guuugaguguaauguagaaauacauuacaaaguucaaauaagcuuuaagcgaaaucauagagaagcagugcuucucauuuuuuu

SEQ ID NO: 1253 - RNA, 12 nt, Artificial Sequence
  OMNI RNA scaffold sequence
guuugcuaggug

SEQ ID NO: 1254 - RNA, 15 nt, Artificial Sequence
  OMNI RNA scaffold sequence
guuugcuaggugugu

SEQ ID NO: 1255 - RNA, 12 nt, Artificial Sequence
  OMNI RNA scaffold sequence
guuugcuaggug

SEQ ID NO: 1256 - RNA, 10 nt, Artificial Sequence
  OMNI RNA scaffold sequence
guuugcuagg

SEQ ID NO: 1257 - RNA, 17 nt, Artificial Sequence
  OMNI RNA scaffold sequence
cacagcugcgugcaaau

SEQ ID NO: 1258 - RNA, 17 nt, Artificial Sequence
  OMNI RNA scaffold sequence
acacacagcugcgugca

SEQ ID NO: 1259 - RNA, 14 nt, Artificial Sequence
  OMNI RNA scaffold sequence
cacagcugcgugca

SEQ ID NO: 1260 - RNA, 12 nt, Artificial Sequence
  OMNI RNA scaffold sequence
cagcugcgugca

SEQ ID NO: 1261 - RNA, 27 nt, Artificial Sequence
  OMNI RNA scaffold sequence
aagucacuuuguggcguauccauaacu

SEQ ID NO: 1262 - RNA, 13 nt, Artificial Sequence
  OMNI RNA scaffold sequence
gucacuuuguggc

SEQ ID NO: 1263 - RNA, 23 nt, Artificial Sequence
  OMNI RNA scaffold sequence
ccccauuggaacggggcuuuuuu

SEQ ID NO: 1264 - RNA, 17 nt, Artificial Sequence
  OMNI RNA scaffold sequence
ccccauuggaacggggc

SEQ ID NO: 1265 - RNA, 83 nt, Artificial Sequence
  OMNI RNA scaffold sequence
guuugcuagguggaaacacagcugcgugcaaauaagucacuuuguggcguauccauaacuccccauuggaacggggcuuuuuu

SEQ ID NO: 1266 - RNA, 17 nt, Artificial Sequence
  OMNI RNA scaffold sequence
guuuuagagcgauguaa

SEQ ID NO: 1267 - RNA, 15 nt, Artificial Sequence
  OMNI RNA scaffold sequence
guuuuagagcgaugu

SEQ ID NO: 1268 - RNA, 12 nt, Artificial Sequence
  OMNI RNA scaffold sequence
guuuuagagcga

SEQ ID NO: 1269 - RNA, 10 nt, Artificial Sequence
  OMNI RNA scaffold sequence
guuuuagagc

SEQ ID NO: 1270 - RNA, 20 nt, Artificial Sequence
  OMNI RNA scaffold sequence
uuacaucgucaaguuaaaau

SEQ ID NO: 1271 - RNA, 19 nt, Artificial Sequence
  OMNI RNA scaffold sequence
acaucgucaaguuaaaaua

SEQ ID NO: 1272 - RNA, 16 nt, Artificial Sequence
  OMNI RNA scaffold sequence
ucgucaaguuaaaaua

SEQ ID NO: 1273 - RNA, 14 nt, Artificial Sequence
  OMNI RNA scaffold sequence
gucaaguuaaaaua

SEQ ID NO: 1274 - RNA, 30 nt, Artificial Sequence
  OMNI RNA scaffold sequence
aaauacuacacuaucugcccuuucgggggc

SEQ ID NO: 1275 - RNA, 24 nt, Artificial Sequence
  OMNI RNA scaffold sequence
gucgccucaggggcgacauuuuuu

SEQ ID NO: 1276 - RNA, 18 nt, Artificial Sequence
  OMNI RNA scaffold sequence
gucgccucaggggcgaca

SEQ ID NO: 1277 - RNA, 95 nt, Artificial Sequence
  OMNI RNA scaffold sequence
guuuuagagcgauguaagaaauuacaucgucaaguuaaaauaaauacuacacuaucugcccuuucgggggcgucgccucaggggcgacauuuuuu

SEQ ID NO: 1278 - RNA, 95 nt, Artificial Sequence
  OMNI RNA scaffold sequence
guucuagagcgauguaagaaauuacaucgucaaguuagaauaaauacuacacuaucugcccuuucgggggcgucgccucaggggcgacauuuuuu

SEQ ID NO: 1279 - RNA, 17 nt, Artificial Sequence
  OMNI RNA scaffold sequence
guucuagagcgauguaa

SEQ ID NO: 1280 - RNA, 20 nt, Artificial Sequence
  OMNI RNA scaffold sequence
uuacaucgucaaguuagaau

SEQ ID NO: 1281 - RNA, 17 nt, Artificial Sequence
  OMNI RNA scaffold sequence
guuuuagaucuauguca

SEQ ID NO: 1282 - RNA, 15 nt, Artificial Sequence
  OMNI RNA scaffold sequence
guuuuagaucuaugu

SEQ ID NO: 1283 - RNA, 12 nt, Artificial Sequence
  OMNI RNA scaffold sequence
guuuuagaucua

SEQ ID NO: 1284 - RNA, 10 nt, Artificial Sequence
  OMNI RNA scaffold sequence
guuuuagauc

SEQ ID NO: 1285 - RNA, 19 nt, Artificial Sequence
  OMNI RNA scaffold sequence
ugacauagagaguuaaaau

SEQ ID NO: 1286 - RNA, 18 nt, Artificial Sequence
  OMNI RNA scaffold sequence
acauagagaguuaaaaua

SEQ ID NO: 1287 - RNA, 15 nt, Artificial Sequence
  OMNI RNA scaffold sequence
uagagaguuaaaaua

SEQ ID NO: 1288 - RNA, 13 nt, Artificial Sequence
  OMNI RNA scaffold sequence
gagaguuaaaaua

SEQ ID NO: 1289 - RNA, 18 nt, Artificial Sequence
  OMNI RNA scaffold sequence
aaagguuuuacccuaaau

SEQ ID NO: 1290 - RNA, 12 nt, Artificial Sequence
  OMNI RNA scaffold sequence
agguuuuacccu

SEQ ID NO: 1291 - RNA, 17 nt, Artificial Sequence
  OMNI RNA scaffold sequence
acucacguauguguagu

SEQ ID NO: 1292 - RNA, 22 nt, Artificial Sequence
  OMNI RNA scaffold sequence
ggacuguuagcaguccuuuuuu

SEQ ID NO: 1293 - RNA, 16 nt, Artificial Sequence
  OMNI RNA scaffold sequence
ggacuguuagcagucc

SEQ ID NO: 1294 - RNA, 97 nt, Artificial Sequence
  OMNI RNA scaffold sequence
guuuuagaucuaugucagaaaugacauagagaguuaaaauaaagguuuuacccuaaauacucacguauguguaguggacuguuagcaguccuuuuuu

SEQ ID NO: 1295 - RNA, 97 nt, Artificial Sequence
  OMNI RNA scaffold sequence
guucuagaucuaugucagaaaugacauagagaguuagaauaaagguuucacccuaaauacucacguauguguaguggacuguuagcaguccuuuuuu

SEQ ID NO: 1296 - RNA, 17 nt, Artificial Sequence
  OMNI RNA scaffold sequence
guucuagaucuauguca

SEQ ID NO: 1297 - RNA, 19 nt, Artificial Sequence
  OMNI RNA scaffold sequence
ugacauagagaguuagaau

SEQ ID NO: 1298 - RNA, 18 nt, Artificial Sequence
  OMNI RNA scaffold sequence
aaagguuucacccuaaau

SEQ ID NO: 1299 - RNA, 18 nt, Artificial Sequence
  OMNI RNA scaffold sequence
guuuuaguucucugaugg

SEQ ID NO: 1300 - RNA, 15 nt, Artificial Sequence
  OMNI RNA scaffold sequence
guuuuaguucucuga

SEQ ID NO: 1301 - RNA, 12 nt, Artificial Sequence
  OMNI RNA scaffold sequence
guuuuaguucuc

SEQ ID NO: 1302 - RNA, 10 nt, Artificial Sequence
  OMNI RNA scaffold sequence
guuuuaguuc

SEQ ID NO: 1303 - RNA, 20 nt, Artificial Sequence
  OMNI RNA scaffold sequence
ccaucaguaaguucuaagau

SEQ ID NO: 1304 - RNA, 18 nt, Artificial Sequence
  OMNI RNA scaffold sequence
ucaguaaguucuaagaua

SEQ ID NO: 1305 - RNA, 15 nt, Artificial Sequence
  OMNI RNA scaffold sequence
guaaguucuaagaua

SEQ ID NO: 1306 - RNA, 11 nt, Artificial Sequence
  OMNI RNA scaffold sequence
guucuaagaua

SEQ ID NO: 1307 - RNA, 13 nt, Artificial Sequence
  OMNI RNA scaffold sequence
aaggcauuaugcc

SEQ ID NO: 1308 - RNA, 11 nt, Artificial Sequence
  OMNI RNA scaffold sequence
ggcauuaugcc

SEQ ID NO: 1309 - RNA, 36 nt, Artificial Sequence
  OMNI RNA scaffold sequence
gagggguauggcgguaaccucauaauccuccgccuc

SEQ ID NO: 1310 - RNA, 28 nt, Artificial Sequence
  OMNI RNA scaffold sequence
aaaacgcaucggaaacggugcguuuuuu

SEQ ID NO: 1311 - RNA, 22 nt, Artificial Sequence
  OMNI RNA scaffold sequence
aaaacgcaucggaaacggugcg

SEQ ID NO: 1312 - RNA, 119 nt, Artificial Sequence
  OMNI RNA scaffold sequence
guuuuaguucucugaugggaaaccaucaguaaguucuaagauaaggcauuaugccgagggguauggcgguaaccucauaauccuccgccucaaaacgcaucggaaacggugcguuuuuu

SEQ ID NO: 1313 - RNA, 119 nt, Artificial Sequence
  OMNI RNA scaffold sequence
gucuuaguucucugaugggaaaccaucaguaaguucuaagauaaggcauuaugccgagggguauggcgguaaccucauaauccuccgccucaaaacgcaucggaaacggugcguuuuuu

SEQ ID NO: 1314 - RNA, 18 nt, Artificial Sequence
  OMNI RNA scaffold sequence
gucuuaguucucugaugg

SEQ ID NO: 1315 - RNA, 18 nt, Artificial Sequence
  OMNI RNA scaffold sequence
guuuugguucucugaugg

SEQ ID NO: 1316 - RNA, 15 nt, Artificial Sequence
  OMNI RNA scaffold sequence
guuuugguucucuga

SEQ ID NO: 1317 - RNA, 12 nt, Artificial Sequence
  OMNI RNA scaffold sequence
guuuugguucuc

SEQ ID NO: 1318 - RNA, 10 nt, Artificial Sequence
  OMNI RNA scaffold sequence
guuuugguuc

SEQ ID NO: 1319 - RNA, 19 nt, Artificial Sequence
  OMNI RNA scaffold sequence
ccaucagaaguucuaagau

SEQ ID NO: 1320 - RNA, 17 nt, Artificial Sequence
  OMNI RNA scaffold sequence
ucagaaguucuaagaua

SEQ ID NO: 1321 - RNA, 14 nt, Artificial Sequence
  OMNI RNA scaffold sequence
gaaguucuaagaua

SEQ ID NO: 1322 - RNA, 11 nt, Artificial Sequence
  OMNI RNA scaffold sequence
guucuaagaua

SEQ ID NO: 1323 - RNA, 20 nt, Artificial Sequence
  OMNI RNA scaffold sequence
aaggcuuuacgccgcagggu

SEQ ID NO: 1324 - RNA, 11 nt, Artificial Sequence
  OMNI RNA scaffold sequence
ggcuuuacgcc

SEQ ID NO: 1325 - RNA, 32 nt, Artificial Sequence
  OMNI RNA scaffold sequence
auggugguaacccgaauauuccaccauuuuuu

SEQ ID NO: 1326 - RNA, 26 nt, Artificial Sequence
  OMNI RNA scaffold sequence
auggugguaacccgaauauuccacca

SEQ ID NO: 1327 - RNA, 93 nt, Artificial Sequence
  OMNI RNA scaffold sequence
guuuugguucucugaugggaaaccaucagaaguucuaagauaaggcuuuacgccgcaggguauggugguaacccgaauauuccaccauuuuuu

SEQ ID NO: 1328 - RNA, 93 nt, Artificial Sequence
  OMNI RNA scaffold sequence
gucuugguucucugaugggaaaccaucagaaguucuaagauaaggcuuuacgccgcaggguauggugguaacccgaauauuccaccauuuuuu

SEQ ID NO: 1329 - RNA, 18 nt, Artificial Sequence
  OMNI RNA scaffold sequence
gucuugguucucugaugg

SEQ ID NO: 1330 - RNA, 16 nt, Artificial Sequence
  OMNI RNA scaffold sequence
guuugagaguauuguu

SEQ ID NO: 1331 - RNA, 15 nt, Artificial Sequence
  OMNI RNA scaffold sequence
guuugagaguauugu

SEQ ID NO: 1332 - RNA, 12 nt, Artificial Sequence
  OMNI RNA scaffold sequence
guuugagaguau

SEQ ID NO: 1333 - RNA, 10 nt, Artificial Sequence
  OMNI RNA scaffold sequence
guuugagagu

SEQ ID NO: 1334 - RNA, 15 nt, Artificial Sequence
  OMNI RNA scaffold sequence
aacaaucguucaaau

SEQ ID NO: 1335 - RNA, 15 nt, Artificial Sequence
  OMNI RNA scaffold sequence
acaaucguucaaaua

SEQ ID NO: 1336 - RNA, 12 nt, Artificial Sequence
  OMNI RNA scaffold sequence
aucguucaaaua

SEQ ID NO: 1337 - RNA, 10 nt, Artificial Sequence
  OMNI RNA scaffold sequence
cguucaaaua

SEQ ID NO: 1338 - RNA, 17 nt, Artificial Sequence
  OMNI RNA scaffold sequence
aagguuuuaccuuaagc

SEQ ID NO: 1339 - RNA, 13 nt, Artificial Sequence
  OMNI RNA scaffold sequence
aagguuuuaccuu

SEQ ID NO: 1340 - RNA, 13 nt, Artificial Sequence
  OMNI RNA scaffold sequence
auccuauuggauc

SEQ ID NO: 1341 - RNA, 29 nt, Artificial Sequence
  OMNI RNA scaffold sequence
agucgacuaaucagagucgacuauuuuuu

SEQ ID NO: 1342 - RNA, 23 nt, Artificial Sequence
  OMNI RNA scaffold sequence
agucgacuaaucagagucgacua

SEQ ID NO: 1343 - RNA, 94 nt, Artificial Sequence
  OMNI RNA scaffold sequence
guuugagaguauuguugaaaaacaaucguucaaauaagguuuuaccuuaagcauccuauuggaucagucgacuaaucagagucgacuauuuuuu

SEQ ID NO: 1344 - RNA, 94 nt, Artificial Sequence
  OMNI RNA scaffold sequence
guuugagaguauuguugaaaaacaaucguucaaauaagguauuaccuuaagcauccuauuggaucagucgacuaaucagagucgacuauuuuuu

SEQ ID NO: 1345 - RNA, 17 nt, Artificial Sequence
  OMNI RNA scaffold sequence
aagguauuaccuuaagc

SEQ ID NO: 1346 - RNA, 19 nt, Artificial Sequence
  OMNI RNA scaffold sequence
guuugagaguauuguuauu

SEQ ID NO: 1347 - RNA, 15 nt, Artificial Sequence
  OMNI RNA scaffold sequence
guuugagaguauugu

SEQ ID NO: 1348 - RNA, 12 nt, Artificial Sequence
  OMNI RNA scaffold sequence
guuugagaguau

SEQ ID NO: 1349 - RNA, 10 nt, Artificial Sequence
  OMNI RNA scaffold sequence
guuugagagu

SEQ ID NO: 1350 - RNA, 18 nt, Artificial Sequence
  OMNI RNA scaffold sequence
aauaacaaucguucaaau

SEQ ID NO: 1351 - RNA, 15 nt, Artificial Sequence
  OMNI RNA scaffold sequence
acaaucguucaaaua

SEQ ID NO: 1352 - RNA, 12 nt, Artificial Sequence
  OMNI RNA scaffold sequence
aucguucaaaua

SEQ ID NO: 1353 - RNA, 10 nt, Artificial Sequence
  OMNI RNA scaffold sequence
cguucaaaua

SEQ ID NO: 1354 - RNA, 17 nt, Artificial Sequence
  OMNI RNA scaffold sequence
aagguuuuaccuuaagc

SEQ ID NO: 1355 - RNA, 13 nt, Artificial Sequence
  OMNI RNA scaffold sequence
aagguuuuaccuu

SEQ ID NO: 1356 - RNA, 13 nt, Artificial Sequence
  OMNI RNA scaffold sequence
auccuauuggauc

SEQ ID NO: 1357 - RNA, 29 nt, Artificial Sequence
  OMNI RNA scaffold sequence
agucgacuaaccagagucgacuauuuuuu

SEQ ID NO: 1358 - RNA, 23 nt, Artificial Sequence
  OMNI RNA scaffold sequence
agucgacuaaccagagucgacua

SEQ ID NO: 1359 - RNA, 100 nt, Artificial Sequence
  OMNI RNA scaffold sequence
guuugagaguauuguuauugaaaaauaacaaucguucaaauaagguuuuaccuuaagcauccuauuggaucagucgacuaaccagagucgacuauuuuuu

SEQ ID NO: 1360 - DNA, 5590 bp, Artificial Sequence
  pET9a-OMNI-140
taatacgactcactatagggagaccacaacggtttccctctagagagacaataaccctgataatgcttcaataatattgaaaaaggaagagtatgcctaagaagaagagaaaggtgggtaccaccgacatcagatacagagtgggcatcgacgtgggcagcttttctatcggaatggccgccattgccatcgacgagcaggataatcctagcgccgtgctgagcatggtgtccctgattcacgatagcggactggaccccgaccagatcaagtctgctgtgacaagactggccagcagcggaatcgccagaagaaccagacggctgtaccggcggaaacggcacagactgcagaagctggatagcttcatcacaagccacggctgggccctgaaggacttcgaggaataccccgatccttatcacccttggcaagtgcgggccgagctgagcacaagcaagattacagatcagggcgagctgggcgagaagctgtctgtggctctgagacacattgccagacacagaggctggcggaacccctacagcaaagtgaacaccctgttcacacaggtgccccacagctctggattcgtggccgtgcaagaagagttcagcaagctgctgggcaccagctttccagaggatgtgacactgagcgagatggtggtgtctgtgcctacaagctctaaggccctgagaggccctaagggactgctgtctgctagactgcagcagagcgactacgccaacgagatcctgaagattgcccagctgcaggatctgagcgagggcctgaccaaagaaatcatcagacacgtgttcgccgccgagtctcctaaaggatcaggcgaaggactgaccggcaaagaccctctgcagcccaatgagtacagagccctgaaagccagcgacgccttccagaagtatcggatcgccgctctgatcggcaacctgagaatcagcgataagagcggccagcaccggctgagcaaagaacaagtgaacgtggtgttcgaccacctgtgcaacctgtccttcaaagaggaacccagctggatcacaatcgccaacctgctgaacatcgacagaggccaactgctgggaaccgccaagatcaccgatgatggcgaaagagccggcgctaagcctcctgtgcacgacaccaatagacggatcgagggcagcaagatcacacccctggtcaattggtggaagcaggccaacgaagaggaacgggccgctatgatcaacgccatgagcaacggcaaggtggacgactacgatagcgccacaggtgctaacgtgcaggccttcttcagcgacctgcctgacgaggaacacaccaagctggatgccctgtacctgcctattggcagagccgcctacagcgaggataccctgcaaagactgacagcccagatgctggacaacgccctggatctgcatgaggccagaaaggccgagttcaacatcgagaacgattgggcccctcctgctcctgccattggcgaacctgttggaaaccctgccgtggacagagtgctgaaaggcgtggcaagatggctgaaggccgccgaatctacatggggagcccctgtgtccatcaatatcgaacatgtgcgggctgccttcatgagcgagctgaaaaccagagagctggaccgggacaacaagaagagagccgagagaaacgaggaactggtggccgagatgtacaccaacctgaacatcaagggcagacctagagccgccgacatctggcggtatcagagcatccagagacagaacggccagtgcgcttactgcggcgtgcccatcgatttcaagaactgcgagatggaccacatcgtgccaagagccggacagggcagcaccaacaccagagataatctggtggctgtgtgcaagccctgcaacagcgagaagtccaacgtgtcatttgccgtgtgggccgccaagacatctagagaaggtgttagcgtggaacaggccgtggaacggacaagacactggattgccgatcctggcctgaacaagaagcagttcgacgcctttgtgaagtccatctgcaaccggctgacccgcaagaccatcgatgaggaaatcgacagccggtccatcgagtctgtggcctggatggccaatgagctgagaagcagaatcgcccagagatacaagaccaccggcaccaaagtgcgggtgtacaaaggcgctctgacagccgaagctagagctgcctctggcatcagcggcaatctgagattcatcgacggcgtgggcaagagcagactggatagaaggcatcatgccgtggatgccgccgtgatcagcttcatctccgactacgtggccgaaacactggcccagagaagcaacctgaagttcagccaagagctgcggagaaaggcccctcagtggaaagagtaccagggctctaacgccgctcacagagccgagtggaatagatggctgcagcggatgcaccacctgagccagctgctgtctcaagctctggaacaggatagagtggtcgtgatgagcaacctgcggctgagacttggaaatggcgccgctcatgaggacaccatcggcaagctgaccagcatcaaagtgggcgacgtgatcaccaccgaagagatcgatagagcctccagcgaagccctttggtgcgcactgaccagacatcccgacttcgaccagaaaaccggcctgcctgccaatcctgagcggtctatcagaatccacggaacccacctgaccgccgacgacacaatcacaagcttccctgtgaatgccggctgtatcgctctgagaggcggctatgtggaactgggcagctcttttcaccacggcagaatctacaaggtgccacagggcaagaaattcgccttctacatgatgcgcgtgtacaccatcgacctgctgccttaccggaaagaggacctgttcagcgtcaccctgaagcctcagacaatgagcgtgcggcagtgtcaccctaaactgagacaggccctggaaaacaacaccgccgagtatctcggctggctggtcacagatgacgagctgctgatcgacaccgccaagttcaatactggacaggtggcaggcgcccagcaagagttcggacaaatcaagagatggcggctggacggcttcgtgtccgattctaagctgagactgaggcccctgcacatgtccaaagagggactgaagcctgacgccagctccgacagcaagaagatcatcgataatcctggctggcggcctgccgtgaacaagctgtttacagatagccacgtgaccgtgatccgcagagatgctctgggtagacccagactccagagcacagcccatctgccaatcacctggcaagtgaagggatcctacccatacgatgttccagattacgcggccgctccaaaaaagaaaagaaaagttgcggctagccatcatcaccatcaccatcatcattaaggctgctaacaaagcccgaaaggaagctgagttggctgctgccaccgctgagcaataactagcataaccccttggggcctctaaacgggtcttgaggggttttttgctgaaaggaggaactatatccggatatccacaggacgggtgtggtcgccatgatcgcgtagtcgatagtggctccaagtagcgaagcgagcaggactgggcggcggccaaagcggtcggacagtgctccgagaacgggtgcgcatagaaattgcatcaacgcatatagcgctagcagcacgccatagtgactggcgatgctgtcggaatggacgatatcccgcaagaggcccggcagtaccggcataaccaagcctatgcctacagcatccagggtgacggtgccgaggatgacgatgagcgcattgttagatttcatacacggtgcctgactgcgttagcaatttaactgtgataaactaccgcattaaagcttatcgatgataagctgtcaaacatgagaattcttagaaaaactcatcgagcatcaaatgaaactgcaatttattcatatcaggattatcaataccatatttttgaaaaagccgtttctgtaatgaaggagaaaactcaccgaggcagttccataggatggcaagatcctggtatcggtctgcgattccgactcgtccaacatcaatacaacctattaatttcccctcgtcaaaaataaggttatcaagtgagaaatcaccatgagtgacgactgaatccggtgagaatggcaaaagcttatgcatttctttccagacttgttcaacaggccagccattacgctcgtcatcaaaatcactcgcatcaaccaaaccgttattcattcgtgattgcgcctgagcgagacgaaatacgcgatcgctgttaaaaggacaattacaaacaggaatcgaatgcaaccggcgcaggaacactgccagcgcatcaacaatattttcacctgaatcaggatattcttctaatacctggaatgctgttttcccggggatcgcagtggtgagtaaccatgcatcatcaggagtacggataaaatgcttgatggtcggaagaggcataaattccgtcagccagtttagtctgaccatctcatctgtaacatcattggcaacgctacctttgccatgtttcagaaacaactctggcgcatcgggcttcccatacaatcgatagattgtcgcacctgattgcccgacattatcgcgagcccatttatacccatataaatcagcatccatgttggaatttaatcgcggcctcgagcaagacgtttcccgttgaatatggctcataacaccccttgtattactgtttatgtaagcagacagttttattgttcatgaccaaaatcccttaacgtgagttttcgttccactgagcgtcagaccccgtagaaaagatcaaaggatcttcttgagatcctttttttctgcgcgtaatctgctgcttgcaaacaaaaaaaccaccgctaccagcggtggtttgtttgccggatcaagagctaccaactctttttccgaaggtaactggcttcagcagagcgcagataccaaatactgtccttctagtgtagccgtagttaggccaccacttcaagaactctgtagcaccgcctacatacctcgctctgctaatcctgttaccagtggctgctgccagtggcgataagtcgtgtcttaccgggttggactcaagacgatagttaccggataaggcgcagcggtcgggctgaacggggggttcgtgcacacagcccagcttggagcgaacgacctacaccgaactgagatacctacagcgtgagctatgagaaagcgccacgcttcccgaagggagaaaggcggacaggtatccggtaagcggcagggtcggaacaggagagcgcacgagggagcttccagggggaaacgcctggtatctttatagtcctgtcgggtttcgccacctctgacttgagcgtcgatttttgtgatgctcgtcaggggggcggagcctatggaaaaacgccagcaacgcggcctttttacggttcctggccttttgctggccttttgctcacatgttcgatcccgcgaaat

SEQ ID NO: 1361 - DNA, 2780 bp, Artificial Sequence
  pShuttle Guide-T2-OMNI-140 V1
tacacggtgcctgactgcgttagcaatttaactgtgataaactaccgcattaaagcttatcgatgataagctgtcaacacatttccccgaaaagtgccacctgacgtcctcgagtcccgcataatcgaaatgagggcctatttcccatgattccttcatatttgcatatacgatacaaggctgttagagagataattagaattaatttgactgtaaacacaaagatattagtacaaaatacgtgacgtagaaagtaataatttcttgggtagtttgcagttttaaaattatgttttaaaatggactatcatatgcttaccgtaacttgaaagtatttcgatttcttggctttatatatcttgctaatacgactcactataggaagagcagagccttggtctcgctggggttcaactctgaaaagagttgaacctcagtaaacaccggctagttttcggtgtcgattgctccaagccggtaacacaattgttaccggcttcttttttgaattctctagcataaccccttggggcctctaaacgggtcttgaggggttttttgacctaggctaggggatatattccgggtaccccgcttcctcgctcactgactcgctacgctcggtcgttcgactgcggcgagcggaaatggcttacgaacggggcggagatttcctggaagatgccaggaagatacttaacagggaagtgagagggccgcggcaaagccgtttttccataggctccgcccccctgacaagcatcacgaaatctgacgctcaaatcagtggtggcgaaacccgacaggactataaagataccaggcgtttccccctggcggctccctcgtgcgctctcctgttcctgcctttcggtttaccggtgtcattccgctgttatggccgcgtttgtctcattccacgcctgacactcagttccgggtaggcagttcgctccaagctggactgtatgcacgaaccccccgttcagtccgaccgctgcgccttatccggtaactatcgtcttgagtccaacccggaaagacatgcaaaagcaccactggcagcagccactggtaattgatttagaggagttagtcttgaagtcatgcgccggttaaggctaaactgaaaggacaagttttggtgactgcgctcctccaagccagttacctcggttcaaagagttggtagctcagagaaccttcgaaaaaccgccctgcaaggcggttttttcgttttcagagcaagagattacgcgcagaccaaaacgatctcaagaagatcatcttattaatcagataaaatatttctagatttcagtgcaatttatctcttcaaatgtagcacctgaagtcagccccatacgatataagttgttactagtgcttggattctcaccaataaaaaacgcccggcggcaaccgagcgttctgaacaaatccagatggagttctgaggtcattactggatctatcaacaggagtccaagcgagaagggttggtttgcgcattcacagttctccgcaagaattgattggctccaattcttggagtggtgaatccgttagcgaggtgccgccggcttccattcaggtcgaggtggcccggctccatgcaccgcgacgcaacgcggggaggcagacaaggtatagggcggcgcctacaatccatgccaacccgttccatgtgctcgccgaggcggcataaatcgccgtgacgatcagcggtccaatgatcgaagttaggctggtaagagccgcgagcgatccttgaagctgtccctgatggtcgtcatctacctgcctggacagcatggcctgcaacgcgggcatcccgatgccgccggaagcgagaagaatcataatggggaaggccatccagcctcgcgtcgcgaacgccagcaagacgtagcccagcgcgtcggccgccatgccggcgataatggcctgcttctcgccgaaacgtttggtggcgggaccagtgacgaaggcttgagcgagggcgtgcaagattccgaataccgcaagcgacaggccgatcatcgtcgcgctccagcgaaagcggtcctcgccgaaaatgacccagagcgctgccggcacctgtcctacgagttgcatgataaagaagacagtcataagtgcggcgacgatagtcatgccccgcgcccaccggaaggagctgactgggttgaaggctctcaagggcatcggtcgacgctctcccttatgcgactcctgcattaggaagcagcccagtagtaggttgaggccgttgagcaccgccgccgcaaggaatggtgcatgcaaggagatggcgcccaacagtcccccggccacggggcctgccaccatacccacgccgaaacaagcgctcatgagcccgaagtggcgagcccgatcttccccatcggtgatgtcggcgatataggcgccagcaaccgcacctgtggcgccggtgatgccggccacgatgcgtccggcgtagaggatccacaggacgggtgtggtcgccatgatcgcgtagtcgatagtggctccaagtagcgaagcgagcaggactgggcggcggccaaagcggtcggacagtgctccgagaacgggtgcgcatagaaattgcatcaacgcatatagcgctagcagcacgccatagtgactggcgatgctgtcggaatggacgatatcccgcaagaggcccggcagtaccggcataaccaagcctatgcctacagcatccagggtgacggtgccgaggatgacgatgagcgcattgttagatttca

SEQ ID NO: 1362 - DNA, 5009 bp, Artificial Sequence
  pbPOS T2 library
  misc_feature (3040)..(3047): n is a, c, g, or t
tcgagtctttacactttatgcttccggctcgtatgttgtgtggaattgtgagcggataacaatttcacacatgattacggattcaacgtcgtgactggtaaaacccgggcgttacccaacttaatcgccttgcagcacatccccctttcgccagcaggcgtaataaggaaaggattcatgtactatttgaaaaacacaaacttttggatgttcggtttattctttttcttttacttttttatcatgggagcctacttcccgtttttcccgatttggctacatgatatcaaccatatcagcaaaagtgatacgggtattatttttgccgctatttctctgttctcgctattattccaaccgctgtttggtctgctttctgacaaactcggtctacgcaaatacctgctgtggattattaccggcatgttagtgatgtttgcgccgttctttatttttatcttcgggccactgctgcagtacaacattttagtagggtcgattgttggtggtatttatctaggctttagttttaacgccggtgcgccagcagtagaggcatttattgagaaagtcagccggcgcagtaatttcgaatttggtcgcgcgcggatgtttggcagtgttggctgggcgctggttgcctcgattgtcgggatcatgttcaccattaataatcagtttgttttctggctgggctctggcagttgtctcatcctcgccgttttactctttttcgccaaaacggacgcgccctcaagtgccacggttgccaatgcggtaggtgccaaccattcggcatttagccttaagctggcactggaactgttcagacagccaaaactgtggtttttgtcactgtatgttattggcgtttcctccacctacgatgtttttgaccaacagtttgctaatttctttacttcgttctttgctaccggtgaacagggtacccgcgtatttggctacgtaacgacaatgggcgaattacttaacgcctcgattatgttctttgcgccactgatcattaatcgcatcggtgggaagaatgccctgctgctggctggcactattatgtctgtacgtattattggctcatcgttcgccacctcagcgctggaagtggttattctgaaaacgctgcatatgtttgaagtaccgttcctgctggtgggctcctttaaatatattactagtcagtttgaagtgcgtttttcagcgacgatttatctggtcagtttcagcttctttaagcaactggcgatgatttttatgtctgtactggcgggcaatatgtatgaaagcataggtttccaaggcgcttatctggtgctgggtctggtggcgctgggcttcaccttaatttccgtgttcacgcttagcggcccgggcccgctttccctgctgcgtcgtcaggtgaatgaagtcgcttaaaggcctcgatgcagctagcatgctaatctgattcgttaccaattatgacaacttgacggctacatcattcactttttcttcacaaccggcacggaactcgctcgggctggccccggtgcattttttaaatacccgcgagaaatagagttgatcgtcaaaaccaacattgcgaccgacggtggcgataggcatccgggtggtgctcaaaagcagcttcgcctggctgatacgttggtcctcgcgccagcttaagacgctaatccctaactgctggcggaaaagatgtgacagacgcgacggcgacaagcaaacatgctgtgcgacgctggcgatatcaaaattgctgtctgccaggtgatcgctgatgtactgacaagcctcgcgtacccgattatccatcggtggatggagcgactcgttaatcgcttccatgcgccgcagtaacaattgctcaagcagatttatcgccagcagctccgaatagcgcccttccccttgcccggcgttaatgatttgcccaaacaggtcgctgaaatgcggctggtgcgcttcatccgggcgaaagaaccccgtattggcaaatattgacggccagttaagccattcatgccagtaggcgcgcggacgaaagtaaacccactggtgataccattcgcgagcctccggatgacgaccgtagtgatgaatctctcctggcgggaacagcaaaatatcacccggtcggcaaacaaattctcgtccctgatttttcaccaccccctgaccgcgaatggtgagattgagaatataacctttcattcccagcggtcggtcgataaaaaaatcgagataaccgttggcctcaatcggcgttaaacccgccaccagatgggcattaaacgagtatcccggcagcaggggatcattttgcgcttcagccatacttttcatactcccgccattcagagaagaaaccaattgtccatattgcatcagacattgccgtcactgcgtcttttactggctcttctcgctaaccaaaccggtaaccccgcttattaaaagcattctgtaacaaagcgggaccaaagccatgacaaaaacgcgtaacaaaagtgtctataatcacggcagaaaagtccacattgattatttgcacggcgtcacactttgctatgccatagcatttttatccataagattagcggatcctacctgacgctttttatcgcaactctctactgtttctccatacccgtttttttggggtagcgattgaaaacgatgcagtttaaggtttacacctataaaagagagagccgttatcgtctgtttgtggatgtacagagtgatattattgacacgcccgggcgacggatggtgatccccctggccagtgcacgtctgctgtcagataaagtctcccgtgaactttacccggtggtgcatatcggggatgaaagctggcgcatgatgaccaccgatatggccagtgtgccggtctccgttatcggggaagaagtggctgatctcagccaccgcgaaaatgacatcaaaaacgccattaacctgatgttttggggaatataatcttctagacatacaatggaagagcagagccttggtctcnnnnnnnnaagcttgatatcgaattcctgcagcccgggggatcccatggtacgcgtgctagaggcatcaaataaaacgaaaggctcagtcgaaagactgggcctttcgttttatctgttgtttgtcggtgaacgctctcctgagtaggacaaatccgccgccctagacctaggcgttcggctgcggcgagcggtatcagctcactcaaaggcggtaatacggttatccacagaatcaggggataacgcaggaaagaacatgtgagcaaaaggccagcaaaaggccaggaaccgtaaaaaggccgcgttgctggcgtttttccataggctccgcccccctgacgagcatcacaaaaatcgacgctcaagtcagaggtggcgaaacccgacaggactataaagataccaggcgtttccccctggaagctccctcgtgcgctctcctgttccgaccctgccgcttaccggatacctgtccgcctttctcccttcgggaagcgtggcgctttctcaatgctcacgctgtaggtatctcagttcggtgtaggtcgttcgctccaagctgggctgtgtgcacgaaccccccgttcagcccgaccgctgcgccttatccggtaactatcgtcttgagtccaacccggtaagacacgacttatcgccactggcagcagccactggtaacaggattagcagagcgaggtatgtaggcggtgctacagagttcttgaagtggtggcctaactacggctacactagaaggacagtatttggtatctgcgctctgctgaagccagttaccttcggaaaaagagttggtagctcttgatccggcaaacaaaccaccgctggtagcggtggtttttttgtttgcaagcagcagattacgcgcagaaaaaaaggatctcaagaagatcctttgatcttttctacggggtctgacgctcagtggaacgaaaactcacgttaagggattttggtcatgactagtgcttggattctcaccaataaaaaacgcccggcggcaaccgagcgttctgaacaaatccagatggagttctgaggtcattactggatctatcaacaggagtccaagcgagctcgatatcaaattacgccccgccctgccactcatcgcagtactgttgtaattcattaagcattctgccgacatggaagccatcacagacggcatgatgaacctgaatcgccagcggcatcagcaccttgtcgccttgcgtataatatttgcccatggtgaaaacgggggcgaagaagttgtccatattggccacgtttaaatcaaaactggtgaaactcacccagggattggctgagacgaaaaacatattctcaataaaccctttagggaaataggccaggttttcaccgtaacacgccacatcttgcgaatatatgtgtagaaactgccggaaatcgtcgtggtattcactccagagcgatgaaaacgtttcagtttgctcatggaaaacggtgtaacaagggtgaacactatcccatatcaccagctcaccgtctttcattgccatacggaattccggatgagcattcatcaggcgggcaagaatgtgaataaaggccggataaaacttgtgcttatttttctttacggtctttaaaaaggccgtaatatccagctgaacggtctggttataggtacattgagcaactgactgaaatgcctcaaaatgttctttacgatgccattgggatatatcaacggtggtatatccagtgatttttttctccattttagcttccttagctcctgaaaatctcgataactcaaaaaatacgcccggtagtgatcttatttcattatggtgaaagttggaacctcttacgtgccgatcaacgtctcattttcgccagatatcgacgtctaagaaaccattattatcatgacattaacctataaaaataggcgtatcacgaggccctttcgtcttcacc

SEQ ID NO: 1363 - protein, 9 aa, Artificial Sequence
  HA Tag
YPYDVPDYA

SEQ ID NO: 1364 - DNA, 27 bp, Artificial Sequence
  HA Tag
tacccatacgatgttccagattacgct

SEQ ID NO: 1365 - protein, 7 aa, Artificial Sequence
  NLS
PKKKRKV

SEQ ID NO: 1366 - DNA, 21 bp, Artificial Sequence
  NLS
ccaaaaaagaaaagaaaagtt

SEQ ID NO: 1367 - protein, 19 aa, Artificial Sequence
  P2A
ATNFSLLKQAGDVEENPGP

SEQ ID NO: 1368 - DNA, 57 bp, Artificial Sequence
  P2A
gccaccaacttcagcctgctgaagcaggccggcgacgtggaggagaaccccggcccc

SEQ ID NO: 1369 - protein, 236 aa, Artificial Sequence
  mCherry
MVSKGEEDNMAIIKEFMRFKVHMEGSVNGHEFEIEGEGEGRPYEGTQTAKLKVTKGGPLPFAWDILSPQFMYGSKAYVKHPADIPDYLKLSFPEGFKWERVMNFEDGGVVTVTQDSSLQDGEFIYKVKLRGTNFPSDGPVMQKKTMGWEASSERMYPEDGALKGEIKQRLKLKDGGHYDAEVKTTYKAKKPVQLPGAYNVNIKLDITSHNEDYTIVEQYERAEGRHSTGGMDELYK

SEQ ID NO: 1370 - DNA, 711 bp, Artificial Sequence
  mCherry
atggtgagcaagggcgaggaggataacatggccatcatcaaggagttcatgcgcttcaaggtgcacatggagggctccgtgaacggccacgagttcgagatcgagggcgagggcgagggccgcccctacgagggcacccagaccgccaagctgaaggtgaccaagggtggccccctgcccttcgcctgggacatcctgtcccctcagttcatgtacggctccaaggcctacgtgaagcaccccgccgacatccccgactacttgaagctgtccttccccgagggcttcaagtgggagcgcgtgatgaacttcgaggacggcggcgtggtgaccgtgacccaggactcctccctgcaggacggcgagttcatctacaaggtgaagctgcgcggcaccaacttcccctccgacggccccgtaatgcagaagaagaccatgggctgggaggcctcctccgagcggatgtaccccgaggacggcgccctgaagggcgagatcaagcagaggctgaagctgaaggacggcggccactacgacgctgaggtcaagaccacctacaaggccaagaagcccgtgcagctgcccggcgcctacaacgtcaacatcaagttggacatcacctcccacaacgaggactacaccatcgtggaacagtacgaacgcgccgagggccgccactccaccggcggcatggacgagctgtacaagtag

SEQ ID NO: 1371 - DNA, 22 bp, Artificial Sequence
  T1 sequence
ggtgcggttcaccagggtgtcg

SEQ ID NO: 1372 - DNA, 22 bp, Artificial Sequence
  T2 sequence
ggaagagcagagccttggtctc

SEQ ID NO: 1373 - RNA, 22 nt, Artificial Sequence
  Spacer sequence
uugaccacuucaauguaaugau

SEQ ID NO: 1374 - RNA, 22 nt, Artificial Sequence
  Spacer sequence
ucauuacauugaaguggucaau

SEQ ID NO: 1375 - RNA, 22 nt, Artificial Sequence
  Spacer sequence
cauggggcucaucccauccuua

SEQ ID NO: 1376 - RNA, 22 nt, Artificial Sequence
  Spacer sequence
gcuccuccggugugugggucuc

SEQ ID NO: 1377 - RNA, 22 nt, Artificial Sequence
  Spacer sequence
cugccugccugggcgggcccgc

SEQ ID NO: 1378 - RNA, 22 nt, Artificial Sequence
  Spacer sequence
uccagaacccugacccugccgu

SEQ ID NO: 1379 - RNA, 22 nt, Artificial Sequence
  Spacer sequence
cucaguuucuucugguaaccca

SEQ ID NO: 1380 - RNA, 22 nt, Artificial Sequence
  Spacer sequence
cagcaggagggcagggauccag

SEQ ID NO: 1381 - RNA, 22 nt, Artificial Sequence
  Spacer sequence
uccagaacccugacccugccgu

SEQ ID NO: 1382 - RNA, 22 nt, Artificial Sequence
  Spacer sequence
gcuccuccggugugugggucuc

SEQ ID NO: 1383 - RNA, 22 nt, Artificial Sequence
  Spacer sequence
cccuagaggcugggucucugga

SEQ ID NO: 1384 - RNA, 22 nt, Artificial Sequence
  Spacer sequence
uccaaggaacaaagagccuuug

SEQ ID NO: 1385 - RNA, 22 nt, Artificial Sequence
  Spacer sequence
uccagaacccugacccugccgu

SEQ ID NO: 1386 - RNA, 22 nt, Artificial Sequence
  Spacer sequence
ugucccuguggccucuggggcu

SEQ ID NO: 1387 - RNA, 22 nt, Artificial Sequence
  Spacer sequence
aacagugcuguggccuggagca

SEQ ID NO: 1388 - RNA, 22 nt, Artificial Sequence
  Spacer sequence
uacacggcagggucaggguucu

SEQ ID NO: 1389 - RNA, 22 nt, Artificial Sequence
  Spacer sequence
accguccaaaacagaacaccaa

SEQ ID NO: 1390 - RNA, 22 nt, Artificial Sequence
  Spacer sequence
cgaaggcccuucggugcuuggg

SEQ ID NO: 1391 - RNA, 22 nt, Artificial Sequence
  Spacer sequence
ucuggggcccugagcagugaaa

SEQ ID NO: 1392 - RNA, 22 nt, Artificial Sequence
  Spacer sequence
agaaagcuagggccucggugau

SEQ ID NO: 1393 - RNA, 22 nt, Artificial Sequence
  Spacer sequence
agcgucaugagcagauuaaacc

SEQ ID NO: 1394 - RNA, 22 nt, Artificial Sequence
  Spacer sequence
cagcggguguagacuccgaggg

SEQ ID NO: 1395 - RNA, 22 nt, Artificial Sequence
  Spacer sequence
agcgucaugagcagauuaaacc

SEQ ID NO: 1396 - RNA, 22 nt, Artificial Sequence
  Spacer sequence
accguccaaaacagaacaccaa

SEQ ID NO: 1397 - RNA, 22 nt, Artificial Sequence
  Spacer sequence
agccccuggcccuggcaggacc

SEQ ID NO: 1398 - RNA, 22 nt, Artificial Sequence
  Spacer sequence
agcgucaugagcagauuaaacc

SEQ ID NO: 1399 - RNA, 22 nt, Artificial Sequence
  Spacer sequence
gccguguaccagcugagagacu

SEQ ID NO: 1400 - RNA, 22 nt, Artificial Sequence
  Spacer sequence
uuccagaagacaccuucuuccc

SEQ ID NO: 1401 - RNA, 22 nt, Artificial Sequence
  Spacer sequence
uaccaguuugccacggcaucaa

SEQ ID NO: 1402 - RNA, 22 nt, Artificial Sequence
  Spacer sequence
uuguggggcagggaagcugagg

SEQ ID NO: 1403 - RNA, 22 nt, Artificial Sequence
  Spacer sequence
aggaugaccaauccauugccca

SEQ ID NO: 1404 - RNA, 22 nt, Artificial Sequence
  Spacer sequence
agguuacacggugagagaagua

SEQ ID NO: 1405 - RNA, 22 nt, Artificial Sequence
  Spacer sequence
ggcuucaagcaacuuguagugg

SEQ ID NO: 1406 - RNA, 22 nt, Artificial Sequence
  Spacer sequence
augggguucagacaacagugga

SEQ ID NO: 1407 - RNA, 22 nt, Artificial Sequence
  Spacer sequence
gccguguaccagcugagagacu

SEQ ID NO: 1408 - RNA, 22 nt, Artificial Sequence
  Spacer sequence
accguccaaaacagaacaccaa

SEQ ID NO: 1409 - RNA, 22 nt, Artificial Sequence
  Spacer sequence
uggccggguuuaaucugcucau

SEQ ID NO: 1410 - RNA, 22 nt, Artificial Sequence
  Spacer sequence
cuuaaauuccaggcucuagaau

SEQ ID NO: 1411 - RNA, 22 nt, Artificial Sequence
  Spacer sequence
guucuuaaauuccaggcucuag

SEQ ID NO: 1412 - RNA, 22 nt, Artificial Sequence
  Spacer sequence
cuagucuggguccuggccguca

SEQ ID NO: 1413 - RNA, 22 nt, Artificial Sequence
  Spacer sequence
gaccacuucaauguaaugauca

SEQ ID NO: 1414 - RNA, 22 nt, Artificial Sequence
  Spacer sequence
accguccaaaacagaacaccag

SEQ ID NO: 1415 - RNA, 22 nt, Artificial Sequence
  Spacer sequence
gcauucuagagccuggaauuua

SEQ ID NO: 1416 - RNA, 22 nt, Artificial Sequence
  Spacer sequence
aguccgggcugggagcgggugg

SEQ ID NO: 1417 - RNA, 22 nt, Artificial Sequence
  Spacer sequence
ggaccagagcgggaggguagga

SEQ ID NO: 1418 - RNA, 22 nt, Artificial Sequence
  Spacer sequence
cagacucggaaccggaagaugu

SEQ ID NO: 1419 - RNA, 22 nt, Artificial Sequence
  Spacer sequence
cuggagcagauccugguggcug

SEQ ID NO: 1420 - RNA, 22 nt, Artificial Sequence
  Spacer sequence
gacccugccguguaccagcuga

SEQ ID NO: 1421 - RNA, 22 nt, Artificial Sequence
  Spacer sequence
caagcuggucgagaaaagcuuu

SEQ ID NO: 1422 - RNA, 22 nt, Artificial Sequence
  Spacer sequence
cagcugcgggaaugggauuccc

SEQ ID NO: 1423 - RNA, 22 nt, Artificial Sequence
  Spacer sequence
agucuacacccgcugugaccau

SEQ ID NO: 1424 - RNA, 22 nt, Artificial Sequence
  Spacer sequence
gguguuauggucacagcgggug

SEQ ID NO: 1425 - RNA, 22 nt, Artificial Sequence
  Spacer sequence
gcuggguccugggaaucccauu

SEQ ID NO: 1426 - RNA, 22 nt, Artificial Sequence
  Spacer sequence
acuacacugaauucacccccac

SEQ ID NO: 1427 - RNA, 22 nt, Artificial Sequence
  Spacer sequence
aauugcgcgccgcugcaggaaa

SEQ ID NO: 1428 - RNA, 22 nt, Artificial Sequence
  Spacer sequence
uacugaagaauggagagagaau

SEQ ID NO: 1429 - RNA, 22 nt, Artificial Sequence
  Spacer sequence
ccagacucggaaccggaagaug

SEQ ID NO: 1430 - RNA, 22 nt, Artificial Sequence
  Spacer sequence
caugagcguggucagggcccgg

SEQ ID NO: 1431 - RNA, 22 nt, Artificial Sequence
  Spacer sequence
ccuacugauauaugggcuucag

SEQ ID NO: 1432 - RNA, 22 nt, Artificial Sequence
  Spacer sequence
caucugcucccgggccgcacga

SEQ ID NO: 1433 - RNA, 22 nt, Artificial Sequence
  Spacer sequence
gacccugccguguaccagcuga

SEQ ID NO: 1434 - RNA, 22 nt, Artificial Sequence
  Spacer sequence
auaaggccaaccaugaugugcu

SEQ ID NO: 1435 - RNA, 22 nt, Artificial Sequence
  Spacer sequence
auucucugcuggaugacgugag

SEQ ID NO: 1436 - RNA, 22 nt, Artificial Sequence
  Spacer sequence
uccuggucauggguuaccagaa

SEQ ID NO: 1437 - RNA, 22 nt, Artificial Sequence
  Spacer sequence
ucaaaaucggugaauaggcaga

SEQ ID NO: 1438 - RNA, 22 nt, Artificial Sequence
  Spacer sequence
gacccugccguguaccagcuga

SEQ ID NO: 1439 - RNA, 22 nt, Artificial Sequence
  Spacer sequence
ggauggcaagagacccacacac

SEQ ID NO: 1440 - RNA, 22 nt, Artificial Sequence
  Spacer sequence
ggucggccacugacaggugcag

1. A non-naturally occurring composition comprising a CRISPR nuclease comprising a sequence having at least 90% identity to the amino acid sequence selected from the group consisting of SEQ ID NO: 68, 1-67, and 68-88 or a nucleic acid molecule comprising a sequence encoding the CRISPR nuclease.

2. The composition of claim 1, further comprising one or more RNA molecules, or a DNA polynucleotide encoding any one of the one or more RNA molecules, wherein the one or more RNA molecules and the CRISPR nuclease do not naturally occur together and the one or more RNA molecules are configured to form a complex with the CRISPR nuclease and/or target the complex to a target site.

3. The composition of claim 2, wherein the CRISPR nuclease comprises a sequence having at least 90% identity to the amino acid sequence set forth in SEQ ID NO: 1, and at least one RNA molecule comprises a sequence selected from the group consisting of SEQ ID NOs: 265-278, 1330-1359, and UUAAAGUAA; and/or
wherein the CRISPR nuclease comprises a sequence having at least 90% identity to the amino acid sequence set forth in SEQ ID NO: 1 and at least one RNA molecule is a CRISPR RNA (crRNA) molecule comprising a guide sequence portion and a sequence selected from the group consisting of SEQ ID NOs: 265-268, 277, 1330-1333, and 1346-1349, and preferably wherein the composition further comprises a transactivating CRISPR RNA (tracrRNA) molecule comprising a sequence set forth in the group consisting of SEQ ID NOS: 269-274, 278, 1334-1342, 1345, 1350-1358, UUAAAGUAA; and/or
wherein the CRISPR nuclease comprises a sequence having at least 90% identity to the amino acid sequence set forth in SEQ ID NO: 1 and at least one RNA molecule is a single-guide RNA (sgRNA) molecule comprising a guide sequence portion and a sequence selected from the group consisting of SEQ ID NOS: 265-278, 1330-1359, and UUAAAGUAA; or
wherein the CRISPR nuclease comprises a sequence having at least 90% identity to the amino acid sequence set forth in SEQ ID NO: 2, and at least one RNA molecule comprises a sequence selected from the group consisting of SEQ ID NOs: 279-293; and/or
wherein the CRISPR nuclease comprises a sequence having at least 90% identity to the amino acid sequence set forth in SEQ ID NO: 2 and at least one RNA molecule is a CRISPR RNA (crRNA) molecule comprising a guide sequence portion and a sequence selected from the group consisting of SEQ ID NOs: 279-282, and preferably wherein the composition further comprises a transactivating CRISPR RNA (tracrRNA) molecule comprising a sequence set forth in the group consisting of SEQ ID NOs: 283-290 and 293; and/or
wherein the CRISPR nuclease comprises a sequence having at least 90% identity to the amino acid sequence set forth in SEQ ID NO: 2 and at least one RNA molecule is a single-guide RNA (sgRNA) molecule comprising a guide sequence portion and a sequence selected from the group consisting of SEQ ID NOs: 279-293; or
wherein the CRISPR nuclease comprises a sequence having at least 90% identity to the amino acid sequence set forth in SEQ ID NO: 3, and at least one RNA molecule comprises a sequence selected from the group consisting of SEQ ID NOs: 294-305; and/or
wherein the CRISPR nuclease comprises a sequence having at least 90% identity to the amino acid sequence set forth in SEQ ID NO: 3 and at least one RNA molecule is a CRISPR RNA (crRNA) molecule comprising a guide sequence portion and a sequence selected from the group consisting of SEQ ID NOS: 294-297, and preferably wherein the composition further comprises a transactivating CRISPR RNA (tracrRNA) molecule comprising a sequence set forth in the group consisting of SEQ ID NOs: 298-304; and/or
wherein the CRISPR nuclease comprises a sequence having at least 90% identity to the amino acid sequence set forth in SEQ ID NO: 3 and at least one RNA molecule is a single-guide RNA (sgRNA) molecule comprising a guide sequence portion and a sequence selected from the group consisting of SEQ ID NOs: 294-305; or
wherein the CRISPR nuclease comprises a sequence having at least 90% identity to the amino acid sequence set forth in SEQ ID NO: 4, and at least one RNA molecule comprises a sequence selected from the group consisting of SEQ ID NOs: 306-319; and/or
wherein the CRISPR nuclease comprises a sequence having at least 90% identity to the amino acid sequence set forth in SEQ ID NO: 4 and at least one RNA molecule is a CRISPR RNA (crRNA) molecule comprising a guide sequence portion and a sequence selected from the group consisting of SEQ ID NOS: 306-309 and preferably wherein the composition further comprises a transactivating CRISPR RNA (tracrRNA) molecule comprising a sequence set forth in the group consisting of SEQ ID NOS: 310-317; and/or
wherein the CRISPR nuclease comprises a sequence having at least 90% identity to the amino acid sequence set forth in SEQ ID NO: 4 and at least one RNA molecule is a single-guide RNA (sgRNA) molecule comprising a guide sequence portion and a sequence selected from the group consisting of SEQ ID NOs: 306-319; or
wherein the CRISPR nuclease comprises a sequence having at least 5, and at least one RNA molecule comprises a sequence selected from the group consisting of SEQ ID NOs: 320-333; and/or
wherein the CRISPR nuclease comprises a sequence having at least 90% identity to the amino acid sequence set forth in SEQ ID NO: 5 and at least one RNA molecule is a CRISPR RNA (crRNA) molecule comprising a guide sequence portion and a sequence selected from the group consisting of SEQ ID NOS: 320-323, and preferably wherein the composition further comprises a transactivating CRISPR RNA (tracrRNA) molecule comprising a sequence set forth in the group consisting of SEQ ID NOs: 324-332; and/or
wherein the CRISPR nuclease comprises a sequence having at least 90% identity to the amino acid sequence set forth in SEQ ID NO: 5 and at least one RNA molecule is a single-guide RNA (sgRNA) molecule comprising a guide sequence portion and a sequence selected from the group consisting of SEQ ID NOs: 320-333; or
wherein the CRISPR nuclease comprises a sequence having at least 90% identity to the amino acid sequence set forth in SEQ ID NO: 6, and at least one RNA molecule comprises a sequence selected from the group consisting of SEQ ID NOs: 334-346; and/or
wherein the CRISPR nuclease comprises a sequence having at least 90% identity to the amino acid sequence set forth in SEQ ID NO: 6 and at least one RNA molecule is a CRISPR RNA (crRNA) molecule comprising a guide sequence portion and a sequence selected from the group consisting of SEQ ID NOS: 334-337, and preferably wherein the composition further comprises a transactivating CRISPR RNA (tracrRNA) molecule comprising a sequence set forth in the group consisting of SEQ ID NOs: 338-345; and/or
wherein the CRISPR nuclease comprises a sequence having at least 90% identity to the amino acid sequence set forth in SEQ ID NO: 6 and at least one RNA molecule is a single-guide RNA (sgRNA) molecule comprising a guide sequence portion and a sequence selected from the group consisting of SEQ ID NOs: 334-346; or
wherein the CRISPR nuclease comprises a sequence having at least 90% identity to the amino acid sequence set forth in SEQ ID NO: 7 or SEQ ID NO: 8, and at least one RNA molecule comprises a sequence selected from the group consisting of SEQ ID NOs: 347-358 and UAGUCGUU; and/or
wherein the CRISPR nuclease comprises a sequence having at least 90% identity to the amino acid sequence set forth in SEQ ID NO: 7 or SEQ ID NO: 8 and at least one RNA molecule is a CRISPR RNA (crRNA) molecule comprising a guide sequence portion and a sequence selected from the group consisting of SEQ ID NOs: 347-350, and preferably wherein the composition further comprises a transactivating CRISPR RNA (tracrRNA) molecule comprising a sequence set forth in the group consisting of SEQ ID NOS: 351-357 and UAGUCGUU; and/or
wherein the CRISPR nuclease comprises a sequence having at least 90% identity to the amino acid sequence set forth in SEQ ID NO: 7 or SEQ ID NO: 8 and at least one RNA molecule is a single-guide RNA (sgRNA) molecule comprising a guide sequence portion and a sequence selected from the group consisting of SEQ ID NOs: 347-358 and UAGUCGUU; or
wherein the CRISPR nuclease comprises a sequence having at least 90% identity to the amino acid sequence set forth in SEQ ID NO: 9, and at least one RNA molecule comprises a sequence selected from the group consisting of SEQ ID NOS: 359-370 and UAGUCGUU; and/or
wherein the CRISPR nuclease comprises a sequence having at least 90% identity to the amino acid sequence set forth in SEQ ID NO: 9 and at least one RNA molecule is a CRISPR RNA (crRNA) molecule comprising a guide sequence portion and a sequence selected from the group consisting of SEQ ID NOs: 359-362, and preferably wherein the composition further comprises a transactivating CRISPR RNA (tracrRNA) molecule comprising a sequence set forth in the group consisting of SEQ ID NOs: 363-369 and UAGUCGUU; and/or
wherein the CRISPR nuclease comprises a sequence having at least 90% identity to the amino acid sequence set forth in SEQ ID NO: 9 and at least one RNA molecule is a single-guide RNA (sgRNA) molecule comprising a guide sequence portion and a sequence selected from the group consisting of SEQ ID NOs: 359-370 and UAGUCGUU; or
wherein the CRISPR nuclease comprises a sequence having at least 90% identity to the amino acid sequence set forth in SEQ ID NO: 10, and at least one RNA molecule comprises a sequence selected from the group consisting of SEQ ID NOs: 371-383; and/or
wherein the CRISPR nuclease comprises a sequence having at least 90% identity to the amino acid sequence set forth in SEQ ID NO: 10 and at least one RNA molecule is a CRISPR RNA (crRNA) molecule comprising a guide sequence portion and a sequence selected from the group consisting of SEQ ID NOs: 371-374, and preferably wherein the composition further comprises a transactivating CRISPR RNA (tracrRNA) molecule comprising a sequence set forth in the group consisting of SEQ ID NOs: 375-382; and/or
wherein the CRISPR nuclease comprises a sequence having at least 90% identity to the amino acid sequence set forth in SEQ ID NO: 10 and at least one RNA molecule is a single-guide RNA (sgRNA) molecule comprising a guide sequence portion and a sequence selected from the group consisting of SEQ ID NOs: 371-383; or
wherein the CRISPR nuclease comprises a sequence having at least 11, and at least one RNA molecule comprises a sequence selected from the group consisting of SEQ ID NOs: 384-395,
wherein the CRISPR nuclease comprises a sequence having at least 90% identity to the amino acid sequence set forth in SEQ ID NO: 11 and at least one RNA molecule is a CRISPR RNA (crRNA) molecule comprising a guide sequence portion and a sequence selected from the group consisting of SEQ ID NOS: 384-387, and preferably wherein the composition further comprises a transactivating CRISPR RNA (tracrRNA) molecule comprising a sequence set forth in the group consisting of SEQ ID NOS: 388-394; and/or
wherein the CRISPR nuclease comprises a sequence having at least 90% identity to the amino acid sequence set forth in SEQ ID NO: 11 and at least one RNA molecule is a single-guide RNA (sgRNA) molecule comprising a guide sequence portion and a sequence selected from the group consisting of SEQ ID NOs: 384-395; or
wherein the CRISPR nuclease comprises a sequence having at least 90% identity to the amino acid sequence set forth in SEQ ID NO: 12, and at least one RNA molecule comprises a sequence selected from the group consisting of SEQ ID NOS: 396-409; and/or
wherein the CRISPR nuclease comprises a sequence having at least 90% identity to the amino acid sequence set forth in SEQ ID NO: 12 and at least one RNA molecule is a CRISPR RNA (crRNA) molecule comprising a guide sequence portion and a sequence selected from the group consisting of SEQ ID NOs: 396-399, and preferably wherein the composition further comprises a transactivating CRISPR RNA (tracrRNA) molecule comprising a sequence set forth in the group consisting of SEQ ID NOs: 400-408; and/or
wherein the CRISPR nuclease comprises a sequence having at least 90% identity to the amino acid sequence set forth in SEQ ID NO: 12 and at least one RNA molecule is a single-guide RNA (sgRNA) molecule comprising a guide sequence portion and a sequence selected from the group consisting of SEQ ID NOs: 396-409; or
wherein the CRISPR nuclease comprises a sequence having at least 90% identity to the amino acid sequence set forth in SEQ ID NO: 13, and at least one RNA molecule comprises a sequence selected from the group consisting of SEQ ID NOs: 410-423; and/or
wherein the CRISPR nuclease comprises a sequence having at least 90% identity to the amino acid sequence set forth in SEQ ID NO: 13 and at least one RNA molecule is a CRISPR RNA (crRNA) molecule comprising a guide sequence portion and a sequence selected from the group consisting of SEQ ID NOs: 410-413, and preferably wherein the composition further comprises a transactivating CRISPR RNA (tracrRNA) molecule comprising a sequence set forth in the group consisting of SEQ ID NOs: 414-422; and/or
wherein the CRISPR nuclease comprises a sequence having at least 90% identity to the amino acid sequence set forth in SEQ ID NO: 13 and at least one RNA molecule is a single-guide RNA (sgRNA) molecule comprising a guide sequence portion and a sequence selected from the group consisting of SEQ ID NOs: 410-423; or
wherein the CRISPR nuclease comprises a sequence having at least 90% identity to the amino acid sequence set forth in SEQ ID NO: 14, and at least one RNA molecule comprises a sequence selected from the group consisting of SEQ ID NOs: 424-442; and/or
wherein the CRISPR nuclease comprises a sequence having at least 90% identity to the amino acid sequence set forth in SEQ ID NO: 14 and at least one RNA molecule is a CRISPR RNA (crRNA) molecule comprising a guide sequence portion and a sequence selected from the group consisting of SEQ ID NOs: 424-427 and 438, and preferably wherein the composition further comprises a transactivating CRISPR RNA (tracrRNA) molecule comprising a sequence set forth in the group consisting of SEQ ID NOS: 428-435 and 439-442; and/or
wherein the CRISPR nuclease comprises a sequence having at least 90% identity to the amino acid sequence set forth in SEQ ID NO: 14 and at least one RNA molecule is a single-guide RNA (sgRNA) molecule comprising a guide sequence portion and a sequence selected from the group consisting of SEQ ID NOs: 424-442; or
wherein the CRISPR nuclease comprises a sequence having at least 90% identity to the amino acid sequence set forth in SEQ ID NO: 15, and at least one RNA molecule comprises a sequence selected from the group consisting of SEQ ID NOs: 443-459; and/or
wherein the CRISPR nuclease comprises a sequence having at least 90% identity to the amino acid sequence set forth in SEQ ID NO: 15 and at least one RNA molecule is a CRISPR RNA (crRNA) molecule comprising a guide sequence portion and a sequence selected from the group consisting of SEQ ID NOs: 443-446 and 458, and preferably wherein the composition further comprises a transactivating CRISPR RNA (tracrRNA) molecule comprising a sequence set forth in the group consisting of SEQ ID NOS: 447-455 and 459; and/or
wherein the CRISPR nuclease comprises a sequence having at least 90% identity to the amino acid sequence set forth in SEQ ID NO: 15 and at least one RNA molecule is a single-guide RNA (sgRNA) molecule comprising a guide sequence portion and a sequence selected from the group consisting of SEQ ID NOs: 443-459; or
wherein the CRISPR nuclease comprises a sequence having at least 90% identity to the amino acid sequence set forth in SEQ ID NO: 16, and at least one RNA molecule comprises a sequence selected from the group consisting of SEQ ID NOs: 460-473; and/or
wherein the CRISPR nuclease comprises a sequence having at least 90% identity to the amino acid sequence set forth in SEQ ID NO: 16 and at least one RNA molecule is a CRISPR RNA (crRNA) molecule comprising a guide sequence portion and a sequence selected from the group consisting of SEQ ID NOs: 460-463, and preferably wherein the composition further comprises a transactivating CRISPR RNA (tracrRNA) molecule comprising a sequence set forth in the group consisting of SEQ ID NOs: 464-472; and/or
wherein the CRISPR nuclease comprises a sequence having at least 90% identity to the amino acid sequence set forth in SEQ ID NO: 16 and at least one RNA molecule is a single-guide RNA (sgRNA) molecule comprising a guide sequence portion and a sequence selected from the group consisting of SEQ ID NOs: 460-473; or
wherein the CRISPR nuclease comprises a sequence having at least 90% identity to the amino acid sequence set forth in SEQ ID NO: 17, and at least one RNA molecule comprises a sequence selected from the group consisting of SEQ ID NOs: 474-487; and/or
wherein the CRISPR nuclease comprises a sequence having at least 90% identity to the amino acid sequence set forth in SEQ ID NO: 17 and at least one RNA molecule is a CRISPR RNA (crRNA) molecule comprising a guide sequence portion and a sequence selected from the group consisting of SEQ ID NOs: 474-477, and preferably wherein the composition further comprises a transactivating CRISPR RNA (tracrRNA) molecule comprising a sequence set forth in the group consisting of SEQ ID NOs: 478-486; and/or
wherein the CRISPR nuclease comprises a sequence having at least 90% identity to the amino acid sequence set forth in SEQ ID NO: 17 and at least one RNA molecule is a single-guide RNA (sgRNA) molecule comprising a guide sequence portion and a sequence selected from the group consisting of SEQ ID NOS: 474-487; or
wherein the CRISPR nuclease comprises a sequence having at least 90% identity to the amino acid sequence set forth in SEQ ID NO: 18, and at least one RNA molecule comprises a sequence selected from the group consisting of SEQ ID NOs: 488-501; and/or
wherein the CRISPR nuclease comprises a sequence having at least 90% identity to the amino acid sequence set forth in SEQ ID NO: 18 and at least one RNA molecule is a CRISPR RNA (crRNA) molecule comprising a guide sequence portion and a sequence selected from the group consisting of SEQ ID NOs: 488-491, and preferably wherein the composition further comprises a transactivating CRISPR RNA (tracrRNA) molecule comprising a sequence set forth in the group consisting of SEQ ID NOs: 492-500; and/or
wherein the CRISPR nuclease comprises a sequence having at least 90% identity to the amino acid sequence set forth in SEQ ID NO: 18 and at least one RNA molecule is a single-guide RNA (sgRNA) molecule comprising a guide sequence portion and a sequence selected from the group consisting of SEQ ID NOs: 488-501; or
wherein the CRISPR nuclease comprises a sequence having at least 90% identity to the amino acid sequence set forth in SEQ ID NO: 19, and at least one RNA molecule comprises a sequence selected from the group consisting of SEQ ID NOs: 502-515; and/or
wherein the CRISPR nuclease comprises a sequence having at least 90% identity to the amino acid sequence set forth in SEQ ID NO: 19 and at least one RNA molecule is a CRISPR RNA (crRNA) molecule comprising a guide sequence portion and a sequence selected from the group consisting of SEQ ID NOs: 502-505, and preferably wherein the composition further comprises a transactivating CRISPR RNA (tracrRNA) molecule comprising a sequence set forth in the group consisting of SEQ ID NOS: 506-514; and/or
wherein the CRISPR nuclease comprises a sequence having at least 90% identity to the amino acid sequence set forth in SEQ ID NO: 19 and at least one RNA molecule is a single-guide RNA (sgRNA) molecule comprising a guide sequence portion and a sequence selected from the group consisting of SEQ ID NOs: 502-515; or
wherein the CRISPR nuclease comprises a sequence having at least 90% identity to the amino acid sequence set forth in SEQ ID NO: 20, and at least one RNA molecule comprises a sequence selected from the group consisting of SEQ ID NOS: 516-531; and/or
wherein the CRISPR nuclease comprises a sequence having at least 90% identity to the amino acid sequence set forth in SEQ ID NO: 20 and at least one RNA molecule is a CRISPR RNA (crRNA) molecule comprising a guide sequence portion and a sequence selected from the group consisting of SEQ ID NOs: 516-519, and preferably wherein the composition further comprises a transactivating CRISPR RNA (tracrRNA) molecule comprising a sequence set forth in the group consisting of SEQ ID NOs: 520-528 and 531; and/or
wherein the CRISPR nuclease comprises a sequence having at least 90% identity to the amino acid sequence set forth in SEQ ID NO: 20 and at least one RNA molecule is a single-guide RNA (sgRNA) molecule comprising a guide sequence portion and a sequence selected from the group consisting of SEQ ID NOs: 516-531; or
wherein the CRISPR nuclease comprises a sequence having at least 90% identity to the amino acid sequence set forth in SEQ ID NO: 21, and at least one RNA molecule comprises a sequence selected from the group consisting of SEQ ID NOs: 532-546; and/or
wherein the CRISPR nuclease comprises a sequence having at least 90% identity to the amino acid sequence set forth in SEQ ID NO: 21 and at least one RNA molecule is a CRISPR RNA (crRNA) molecule comprising a guide sequence portion and a sequence selected from the group consisting of SEQ ID NOs: 532-535, and preferably wherein the composition further comprises a transactivating CRISPR RNA (tracrRNA) molecule comprising a sequence set forth in the group consisting of SEQ ID NOs: 536-543 and 546; and/or
wherein the CRISPR nuclease comprises a sequence having at least 90% identity to the amino acid sequence set forth in SEQ ID NO: 21 and at least one RNA molecule is a single-guide RNA (sgRNA) molecule comprising a guide sequence portion and a sequence selected from the group consisting of SEQ ID NOs: 532-546; or
wherein the CRISPR nuclease comprises a sequence having at least 90% identity to the amino acid sequence set forth in SEQ ID NO: 22, SEQ ID NO: 23, SEQ ID NO: 24, SEQ ID NO: 25, or SEQ ID NO: 27 and at least one RNA molecule comprises a sequence selected from the group consisting of SEQ ID NOs: 547-560; and/or
wherein the CRISPR nuclease comprises a sequence having at least 90% identity to the amino acid sequence set forth in SEQ ID NO: 22, SEQ ID NO: 23, SEQ ID NO: 24, SEQ ID NO: 25, or SEQ ID NO: 27 and at least one RNA molecule is a CRISPR RNA (crRNA) molecule comprising a guide sequence portion and a sequence selected from the group consisting of SEQ ID NOs: 547-550, and preferably wherein the composition further comprises a transactivating CRISPR RNA (tracrRNA) molecule comprising a sequence set forth in the group consisting of SEQ ID NOS: 551-559; and/or
wherein the CRISPR nuclease comprises a sequence having at least 90% identity to the amino acid sequence set forth in SEQ ID NO: 22, SEQ ID NO: 23, SEQ ID NO: 24, SEQ ID NO: 25, or SEQ ID NO: 27 and at least one RNA molecule is a single-guide RNA (sgRNA) molecule comprising a guide sequence portion and a sequence selected from the group consisting of SEQ ID NOs: 547-560; and/or
wherein the CRISPR nuclease comprises a sequence having at least 90% identity to the amino acid sequence set forth in SEQ ID NO: 27, and at least one RNA molecule comprises a sequence selected from the group consisting of SEQ ID NOs: 561-576; and/or
wherein the CRISPR nuclease comprises a sequence having at least 90% identity to the amino acid sequence set forth in SEQ ID NO: 27 and at least one RNA molecule is a CRISPR RNA (crRNA) molecule comprising a guide sequence portion and a sequence selected from the group consisting of SEQ ID NOS: 561-564 and 575, and preferably wherein the composition further comprises a transactivating CRISPR RNA (tracrRNA) molecule comprising a sequence set forth in the group consisting of SEQ ID NOS: 565-572 and 576; and/or
wherein the CRISPR nuclease comprises a sequence having at least 90% identity to the amino acid sequence set forth in SEQ ID NO: 27 and at least one RNA molecule is a single-guide RNA (sgRNA) molecule comprising a guide sequence portion and a sequence selected from the group consisting of SEQ ID NOs: 561-576; or
wherein the CRISPR nuclease comprises a sequence having at least 90% identity to the amino acid sequence set forth in SEQ ID NO: 28, and at least one RNA molecule comprises a sequence selected from the group consisting of SEQ ID NOs: 577-590; and/or
wherein the CRISPR nuclease comprises a sequence having at least 90% identity to the amino acid sequence set forth in SEQ ID NO: 28 and at least one RNA molecule is a CRISPR RNA (crRNA) molecule comprising a guide sequence portion and a sequence selected from the group consisting of SEQ ID NOs: 577-580, and preferably wherein the composition further comprises a transactivating CRISPR RNA (tracrRNA) molecule comprising a sequence set forth in the group consisting of SEQ ID NOs: 581-589; and/or
wherein the CRISPR nuclease comprises a sequence having at least 90% identity to the amino acid sequence set forth in SEQ ID NO: 28 and at least one RNA molecule is a single-guide RNA (sgRNA) molecule comprising a guide sequence portion and a sequence selected from the group consisting of SEQ ID NOs: 577-590; or
wherein the CRISPR nuclease comprises a sequence having at least 90% identity to the amino acid sequence set forth in SEQ ID NO:
29 or SEQ ID NO: 30, and at least one RNA molecule comprises a sequence selected from the group consisting of SEQ ID NOs: 591-618; and/or
wherein the CRISPR nuclease comprises a sequence having at least 90% identity to the amino acid sequence set forth in SEQ ID NO: 29 or SEQ ID NO: 30 and at least one RNA molecule is a CRISPR RNA (crRNA) molecule comprising a guide sequence portion and a sequence selected from the group consisting of SEQ ID NOs: 591-594 and 605-608, and preferably wherein the composition further comprises a transactivating CRISPR RNA (tracrRNA) molecule comprising a sequence set forth in the group consisting of SEQ ID NOs: 595-603 and 609-617; and/or
wherein the CRISPR nuclease comprises a sequence having at least 90% identity to the amino acid sequence set forth in SEQ ID NO: 29 or SEQ ID NO: 30 and at least one RNA molecule is a single-guide RNA (sgRNA) molecule comprising a guide sequence portion and a sequence selected from the group consisting of SEQ ID NOs: 591-618; or
wherein the CRISPR nuclease comprises a sequence having at least 90% identity to the amino acid sequence set forth in SEQ ID NO: 31, and at least one RNA molecule comprises a sequence selected from the group consisting of SEQ ID NOs: 619-633; and/or
wherein the CRISPR nuclease comprises a sequence having at least 90% identity to the amino acid sequence set forth in SEQ ID NO: 31 and at least one RNA molecule is a CRISPR RNA (crRNA) molecule comprising a guide sequence portion and a sequence selected from the group consisting of SEQ ID NOs: 619-622, and preferably wherein the composition further comprises a transactivating CRISPR RNA (tracrRNA) molecule comprising a sequence set forth in the group consisting of SEQ ID NOs: 623-630 and 633; and/or
wherein the CRISPR nuclease comprises a sequence having at least 90% identity to the amino acid sequence set forth in SEQ ID NO: 31 and at least one RNA molecule is a single-guide RNA (sgRNA) molecule comprising a guide sequence portion and a sequence selected from the group consisting of SEQ ID NOS: 619-633; or
wherein the CRISPR nuclease comprises a sequence having at least 32, and at least one RNA molecule comprises a sequence selected from the group consisting of SEQ ID NOs: 634-650; and/or
wherein the CRISPR nuclease comprises a sequence having at least 90% identity to the amino acid sequence set forth in SEQ ID NO: 32 and at least one RNA molecule is a CRISPR RNA (crRNA) molecule comprising a guide sequence portion and a sequence selected from the group consisting of SEQ ID NOs: 634-637 and 649, and preferably wherein the composition further comprises a transactivating CRISPR RNA (tracrRNA) molecule comprising a sequence set forth in the group consisting of SEQ ID NOS: 638-646 and 650; and/or
wherein the CRISPR nuclease comprises a sequence having at least 90% identity to the amino acid sequence set forth in SEQ ID NO: 32 and at least one RNA molecule is a single-guide RNA (sgRNA) molecule comprising a guide sequence portion and a sequence selected from the group consisting of SEQ ID NOs: 634-650; or
wherein the CRISPR nuclease comprises a sequence having at least 90% identity to the amino acid sequence set forth in SEQ ID NO: 33, and at least one RNA molecule comprises a sequence selected from the group consisting of SEQ ID NOs: 651-664; and/or
wherein the CRISPR nuclease comprises a sequence having at least 90% identity to the amino acid sequence set forth in SEQ ID NO: 33 and at least one RNA molecule is a CRISPR RNA (crRNA) molecule comprising a guide sequence portion and a sequence selected from the group consisting of SEQ ID NOs: 651-654, and preferably wherein the composition further comprises a transactivating CRISPR RNA (tracrRNA) molecule comprising a sequence set forth in the group consisting of SEQ ID NOs: 655-663; and/or
wherein the CRISPR nuclease comprises a sequence having at least 90% identity to the amino acid sequence set forth in SEQ ID NO: 33 and at least one RNA molecule is a single-guide RNA (sgRNA) molecule comprising a guide sequence portion and a sequence selected from the group consisting of SEQ ID NOs: 651-664; or
wherein the CRISPR nuclease comprises a sequence having at least 90% identity to the amino acid sequence set forth in SEQ ID NO: 34 or SEQ ID NO: 35, and at least one RNA molecule comprises a sequence selected from the group consisting of SEQ ID NOs: 665-676; and/or
wherein the CRISPR nuclease comprises a sequence having at least 90% identity to the amino acid sequence set forth in SEQ ID NO: 34 or SEQ ID NO: 35 and at least one RNA molecule is a CRISPR RNA (crRNA) molecule comprising a guide sequence portion and a sequence selected from the group consisting of SEQ ID NOs: 665-668, and preferably wherein the composition further comprises a transactivating CRISPR RNA (tracrRNA) molecule comprising a sequence set forth in the group consisting of SEQ ID NOS: 669-675; or
wherein the CRISPR nuclease comprises a sequence having at least 90% identity to the amino acid sequence set forth in SEQ ID NO: 34 or SEQ ID NO: 35 and at least one RNA molecule is a single-guide RNA (sgRNA) molecule comprising a guide sequence portion and a sequence selected from the group consisting of SEQ ID NOS: 665-676; or
wherein the CRISPR nuclease comprises a sequence having at least 90% identity to the amino acid sequence set forth in SEQ ID NO: 36 or SEQ ID NO: 37, and at least one RNA molecule comprises a sequence selected from the group consisting of SEQ ID NOS: 677-700; and/or
wherein the CRISPR nuclease comprises a sequence having at least 90% identity to the amino acid sequence set forth in SEQ ID NO: 36 or SEQ ID NO: 37 and at least one RNA molecule is a CRISPR RNA (crRNA) molecule comprising a guide sequence portion and a sequence selected from the group consisting of SEQ ID NOs: 677-680 and 689-692, and preferably wherein the composition further comprises a transactivating CRISPR RNA (tracrRNA) molecule comprising a sequence set forth in the group consisting of SEQ ID NOs: 681-687 and 693-699; and/or
wherein the CRISPR nuclease comprises a sequence having at least 908 identity to the amino acid sequence set forth in SEQ ID NO: 36 or SEQ ID NO: 37 and at least one RNA molecule is a single-guide RNA (sgRNA) molecule comprising a guide sequence portion and a sequence selected from the group consisting of SEQ ID NOs: 677-700; or
wherein the CRISPR nuclease comprises a sequence having at least 90% identity to the amino acid sequence set forth in SEQ ID NO: 38, SEQ ID NO: 39 or SEQ ID NO: 40, and at least one RNA molecule comprises a sequence selected from the group consisting of SEQ ID NOs: 701-715; and/or
wherein the CRISPR nuclease comprises a sequence having at least 90% identity to the amino acid sequence set forth in SEQ ID NO: 38, SEQ ID NO: 39 or SEQ ID NO: 40 and at least one RNA molecule is a CRISPR RNA (crRNA) molecule comprising a guide sequence portion and a sequence selected from the group consisting of SEQ ID NOs: 701-704, and preferably wherein the composition further comprises a transactivating CRISPR RNA (tracrRNA) molecule comprising a sequence set forth in the group consisting of SEQ ID NOS: 705-712 and 715; and/or
wherein the CRISPR nuclease comprises a sequence having at least 90% identity to the amino acid sequence set forth in SEQ ID NO: 38, SEQ ID NO: 39 or SEQ ID NO: 40 and at least one RNA molecule is a single-guide RNA (sgRNA) molecule comprising a guide sequence portion and a sequence selected from the group consisting of SEQ ID NOS: 701-715; or
wherein the CRISPR nuclease comprises a sequence having at least 90% identity to the amino acid sequence set forth in SEQ ID NO: 41 or SEQ ID NO: 42, and at least one RNA molecule comprises a sequence selected from the group consisting of SEQ ID NOs: 716-743; and/or
wherein the CRISPR nuclease comprises a sequence having at least 90% identity to the amino acid sequence set forth in SEQ ID NO: 41 or SEQ ID NO: 42 and at least one RNA molecule is a CRISPR RNA (crRNA) molecule comprising a guide sequence portion and a sequence selected from the group consisting of SEQ ID NOs: 716-719 and 730-733, and preferably wherein the composition further comprises a transactivating CRISPR RNA (tracrRNA) molecule comprising a sequence set forth in the group consisting of SEQ ID NOs: 720-728 and 734-742; and/or
wherein the CRISPR nuclease comprises a sequence having at least 90% identity to the amino acid sequence set forth in SEQ ID NO: 41 or SEQ ID NO: 42 and at least one RNA molecule is a single-guide RNA (sgRNA) molecule comprising a guide sequence portion and a sequence selected from the group consisting of SEQ ID NOS: 716-743; or
wherein the CRISPR nuclease comprises a sequence having at least 90% identity to the amino acid sequence set forth in SEQ ID NO: 43, and at least one RNA molecule comprises a sequence selected from the group consisting of SEQ ID NOs: 744-759; and/or
wherein the CRISPR nuclease comprises a sequence having at least 90% identity to the amino acid sequence set forth in SEQ ID NO: 43 and at least one RNA molecule is a CRISPR RNA (crRNA) molecule comprising a guide sequence portion and a sequence selected from the group consisting of SEQ ID NOs: 744-747, and preferably wherein the composition further comprises a transactivating CRISPR RNA (tracrRNA) molecule comprising a sequence set forth in the group consisting of SEQ ID NOS: 748-756 and 759; and/or
wherein the CRISPR nuclease comprises a sequence having at least 90% identity to the amino acid sequence set forth in SEQ ID NO: 43 and at least one RNA molecule is a single-guide RNA (sgRNA) molecule comprising a guide sequence portion and a sequence selected from the group consisting of SEQ ID NOs: 744-759; or
wherein the CRISPR nuclease comprises a sequence having at least 90% identity to the amino acid sequence set forth in SEQ ID NO: 44, and at least one RNA molecule comprises a sequence selected from the group consisting of SEQ ID NOs: 760-775; and/or
wherein the CRISPR nuclease comprises a sequence having at least 90% identity to the amino acid sequence set forth in SEQ ID NO: 44 and at least one RNA molecule is a CRISPR RNA (crRNA) molecule comprising a guide sequence portion and a sequence selected from the group consisting of SEQ ID NOs: 760-763, and preferably wherein the composition further comprises a transactivating CRISPR RNA (tracrRNA) molecule comprising a sequence set forth in the group consisting of SEQ ID NOS: 764-772 and 775; and/or
wherein the CRISPR nuclease comprises a sequence having at least 90% identity to the amino acid sequence set forth in SEQ ID NO: 44 and at least one RNA molecule is a single-guide RNA (sgRNA) molecule comprising a guide sequence portion and a sequence selected from the group consisting of SEQ ID NOs: 760-775; or
wherein the CRISPR nuclease comprises a sequence having at least 90% identity to the amino acid sequence set forth in SEQ ID NO: 45, and at least one RNA molecule comprises a sequence selected from the group consisting of SEQ ID NOs: 776-788; and/or
wherein the CRISPR nuclease comprises a sequence having at least 90% identity to the amino acid sequence set forth in SEQ ID NO: 45 and at least one RNA molecule is a CRISPR RNA (crRNA) molecule comprising a guide sequence portion and a sequence selected from the group consisting of SEQ ID NOs: 776-779, and preferably wherein the composition further comprises a transactivating CRISPR RNA (tracrRNA) molecule comprising a sequence set forth in the group consisting of SEQ ID NOs: 780-787; and/or
wherein the CRISPR nuclease comprises a sequence having at least 90% identity to the amino acid sequence set forth in SEQ ID NO: 45 and at least one RNA molecule is a single-guide RNA (sgRNA) molecule comprising a guide sequence portion and a sequence selected from the group consisting of SEQ ID NOs: 776-788; or
wherein the CRISPR nuclease comprises a sequence having at least 90% identity to the amino acid sequence set forth in SEQ ID NO: 46, and at least one RNA molecule comprises a sequence selected from the group consisting of SEQ ID NOs: 789-800; and/or
wherein the CRISPR nuclease comprises a sequence having at least 90% identity to the amino acid sequence set forth in SEQ ID NO: 46 and at least one RNA molecule is a CRISPR RNA (crRNA) molecule comprising a guide sequence portion and a sequence selected from the group consisting of SEQ ID NOs: 789-792, and preferably wherein the composition further comprises a transactivating CRISPR RNA (tracrRNA) molecule comprising a sequence set forth in the group consisting of SEQ ID NOs: 793-799; and/or
wherein the CRISPR nuclease comprises a sequence having at least 90% identity to the amino acid sequence set forth in SEQ ID NO: 46 and at least one RNA molecule is a single-guide RNA (sgRNA) molecule comprising a guide sequence portion and a sequence selected from the group consisting of SEQ ID NOs: 789-800; or
wherein the CRISPR nuclease comprises a sequence having at least 90% identity to the amino acid sequence set forth in SEQ ID NO: 47, and at least one RNA molecule comprises a sequence selected from the group consisting of SEQ ID NOs: 801-812; and/or
wherein the CRISPR nuclease comprises a sequence having at least 90% identity to the amino acid sequence set forth in SEQ ID NO: 47 and at least one RNA molecule is a CRISPR RNA (crRNA) molecule comprising a guide sequence portion and a sequence selected from the group consisting of SEQ ID NOs: 801-804 a transactivating CRISPR RNA (tracrRNA) molecule comprising a sequence set forth in the group consisting of SEQ ID NOs: 805-811; and/or
wherein the CRISPR nuclease comprises a sequence having at least 90% identity to the amino acid sequence set forth in SEQ ID NO: 47 and at least one RNA molecule is a single-guide RNA (sgRNA) molecule comprising a guide sequence portion and a sequence selected from the group consisting of SEQ ID NOs: 801-812; or
wherein the CRISPR nuclease comprises a sequence having at least 90% identity to the amino acid sequence set forth in SEQ ID NO: 48, and at least one RNA molecule comprises a sequence selected from the group consisting of SEQ ID NOs: 813-825; and/or
wherein the CRISPR nuclease comprises a sequence having at least 90% identity to the amino acid sequence set forth in SEQ ID NO: 48 and at least one RNA molecule is a CRISPR RNA (crRNA) molecule comprising a guide sequence portion and a sequence selected from the group consisting of SEQ ID NOs: 813-816, and preferably wherein the composition further comprises a transactivating CRISPR RNA (tracrRNA) molecule comprising a sequence set forth in the group consisting of SEQ ID NOs: 817-824; and/or
wherein the CRISPR nuclease comprises a sequence having at least 90% identity to the amino acid sequence set forth in SEQ ID NO: 48 and at least one RNA molecule is a single-guide RNA (sgRNA) molecule comprising a guide sequence portion and a sequence selected from the group consisting of SEQ ID NOs: 813-825; or
wherein the CRISPR nuclease comprises a sequence having at least 90% identity to the amino acid sequence set forth in SEQ ID NO: 49, and at least one RNA molecule comprises a sequence selected from the group consisting of SEQ ID NOs: 826-837; and/or
wherein the CRISPR nuclease comprises a sequence having at least 90% identity to the amino acid sequence set forth in SEQ ID NO: 49 and at least one RNA molecule is a CRISPR RNA (crRNA) molecule comprising a guide sequence portion and a sequence selected from the group consisting of SEQ ID NOs: 826-829, and preferably wherein the composition further comprises a transactivating CRISPR RNA (tracrRNA) molecule comprising a sequence set forth in the group consisting of SEQ ID NOs: 830-836; and/or
wherein the CRISPR nuclease comprises a sequence having at least 90% identity to the amino acid sequence set forth in SEQ ID NO: 49 and at least one RNA molecule is a single-guide RNA (sgRNA) molecule comprising a guide sequence portion and a sequence selected from the group consisting of SEQ ID NOs: 826-837; or
wherein the CRISPR nuclease comprises a sequence having at least 50, and at least one RNA molecule comprises a sequence selected from the group consisting of SEQ ID NOs: 838-849; and/or
wherein the CRISPR nuclease comprises a sequence having at least 90% identity to the amino acid sequence set forth in SEQ ID NO: 50 and at least one RNA molecule is a CRISPR RNA (crRNA) molecule comprising a guide sequence portion and a sequence selected from the group consisting of SEQ ID NOs: 838-841, and preferably wherein the composition further comprises a transactivating CRISPR RNA (tracrRNA) molecule comprising a sequence set forth in the group consisting of SEQ ID NOs: 842-848; and/or
wherein the CRISPR nuclease comprises a sequence having at least 90% identity to the amino acid sequence set forth in SEQ ID NO: 50 and at least one RNA molecule is a single-guide RNA (sgRNA) molecule comprising a guide sequence portion and a sequence selected from the group consisting of SEQ ID NOs: 838-849; or
wherein the CRISPR nuclease comprises a sequence having at least 90% identity to the amino acid sequence set forth in SEQ ID NO: 51, and at least one RNA molecule comprises a sequence selected from the group consisting of SEQ ID NOs: 850-863; and/or
wherein the CRISPR nuclease comprises a sequence having at least 90% identity to the amino acid sequence set forth in SEQ ID NO: 51 and at least one RNA molecule is a CRISPR RNA (crRNA) molecule comprising a guide sequence portion and a sequence selected from the group consisting of SEQ ID NOS: 850-853, and preferably wherein the composition further comprises a transactivating CRISPR RNA (tracrRNA) molecule comprising a sequence set forth in the group consisting of SEQ ID NOs: 854-862; and/or
wherein the CRISPR nuclease comprises a sequence having at least 90% identity to the amino acid sequence set forth in SEQ ID NO: 51 and at least one RNA molecule is a single-guide RNA (sgRNA) molecule comprising a guide sequence portion and a sequence selected from the group consisting of SEQ ID NOs: 850-863; or
wherein the CRISPR nuclease comprises a sequence having at least 90% identity to the amino acid sequence set forth in SEQ ID NO: 52, and at least one RNA molecule comprises a sequence selected from the group consisting of SEQ ID NOs: 864-877; and/or
wherein the CRISPR nuclease comprises a sequence having at least 90% identity to the amino acid sequence set forth in SEQ ID NO: 52 and at least one RNA molecule is a CRISPR RNA (crRNA) molecule comprising a guide sequence portion and a sequence selected from the group consisting of SEQ ID NOs: 864-867, and preferably wherein the composition further comprises a transactivating CRISPR RNA (tracrRNA) molecule comprising a sequence set forth in the group consisting of SEQ ID NOs: 868-876; and/or
wherein the CRISPR nuclease comprises a sequence having at least 90% identity to the amino acid sequence set forth in SEQ ID NO: 52 and at least one RNA molecule is a single-guide RNA (sgRNA) molecule comprising a guide sequence portion and a sequence selected from the group consisting of SEQ ID NOs: 864-877; or
wherein the CRISPR nuclease comprises a sequence having at least 90% identity to the amino acid sequence set forth in SEQ ID NO: 53, and at least one RNA molecule comprises a sequence selected from the group consisting of SEQ ID NOs: 878-891; and/or
wherein the CRISPR nuclease comprises a sequence having at least 90% identity to the amino acid sequence set forth in SEQ ID NO: 53 and at least one RNA molecule is a CRISPR RNA (crRNA) molecule comprising a guide sequence portion and a sequence selected from the group consisting of SEQ ID NOs: 878-881, and preferably wherein the composition further comprises a transactivating CRISPR RNA (tracrRNA) molecule comprising a sequence set forth in the group consisting of SEQ ID NOs: 882-890; and/or
wherein the CRISPR nuclease comprises a sequence having at least 90% identity to the amino acid sequence set forth in SEQ ID NO: 53 and at least one RNA molecule is a single-guide RNA (sgRNA) molecule comprising a guide sequence portion and a sequence selected from the group consisting of SEQ ID NOs: 878-891; and/or
wherein the CRISPR nuclease comprises a sequence having at least 90% identity to the amino acid sequence set forth in SEQ ID NO: 54, and at least one RNA molecule comprises a sequence selected from the group consisting of SEQ ID NOs: 892-906; and/or
wherein the CRISPR nuclease comprises a sequence having at least 90% identity to the amino acid sequence set forth in SEQ ID NO: 54 and at least one RNA molecule is a CRISPR RNA (crRNA) molecule comprising a guide sequence portion and a sequence selected from the group consisting of SEQ ID NOs: 892-895, and preferably wherein the composition further comprises a transactivating CRISPR RNA (tracrRNA) molecule comprising a sequence set forth in the group consisting of SEQ ID NOs: 896-903 and 906; and/or
wherein the CRISPR nuclease comprises a sequence having at least 90% identity to the amino acid sequence set forth in SEQ ID NO: 54 and at least one RNA molecule is a single-guide RNA (sgRNA) molecule comprising a guide sequence portion and a sequence selected from the group consisting of SEQ ID NOs: 892-906; and/or
wherein the CRISPR nuclease comprises a sequence having at least 55, and at least one RNA molecule comprises a sequence selected from the group consisting of SEQ ID NOs: 907-920; and/or
wherein the CRISPR nuclease comprises a sequence having at least 90% identity to the amino acid sequence set forth in SEQ ID NO: 55 and at least one RNA molecule is a CRISPR RNA (crRNA) molecule comprising a guide sequence portion and a sequence selected from the group consisting of SEQ ID NOs: 907-910, and preferably wherein the composition further comprises a transactivating CRISPR RNA (tracrRNA) molecule comprising a sequence set forth in the group consisting of SEQ ID NOs: 911-919; and/or
wherein the CRISPR nuclease comprises a sequence having at least 90% identity to the amino acid sequence set forth in SEQ ID NO: 55 and at least one RNA molecule is a single-guide RNA (sgRNA) molecule comprising a guide sequence portion and a sequence selected from the group consisting of SEQ ID NOs: 907-920; or
wherein the CRISPR nuclease comprises a sequence having at least 90% identity to the amino acid sequence set forth in SEQ ID NO: 56, and at least one RNA molecule comprises a sequence selected from the group consisting of SEQ ID NOs: 921-933; and/or
wherein the CRISPR nuclease comprises a sequence having at least 90% identity to the amino acid sequence set forth in SEQ ID NO: 56 and at least one RNA molecule is a CRISPR RNA (crRNA) molecule comprising a guide sequence portion and a sequence selected from the group consisting of SEQ ID NOs: 921-924, and preferably wherein the composition further comprises a transactivating CRISPR RNA (tracrRNA) molecule comprising a sequence set forth in the group consisting of SEQ ID NOs: 925-932; and/or
wherein the CRISPR nuclease comprises a sequence having at least 90% identity to the amino acid sequence set forth in SEQ ID NO: 56 and at least one RNA molecule is a single-guide RNA (sgRNA) molecule comprising a guide sequence portion and a sequence selected from the group consisting of SEQ ID NOs: 921-933; or
wherein the CRISPR nuclease comprises a sequence having at least 90% identity to the amino acid sequence set forth in SEQ ID NO: 57, and at least one RNA molecule comprises a sequence selected from the group consisting of SEQ ID NOs: 934-947; and/or
wherein the CRISPR nuclease comprises a sequence having at least 90% identity to the amino acid sequence set forth in SEQ ID NO: 57 and at least one RNA molecule is a CRISPR RNA (crRNA) molecule comprising a guide sequence portion and a sequence selected from the group consisting of SEQ ID NOs: 934-937, and preferably wherein the composition further comprises a transactivating CRISPR RNA (tracrRNA) molecule comprising a sequence set forth in the group consisting of SEQ ID NOs: 938-946; and/or
wherein the CRISPR nuclease comprises a sequence having at least 90% identity to the amino acid sequence set forth in SEQ ID NO: 57 and at least one RNA molecule is a single-guide RNA (sgRNA) molecule comprising a guide sequence portion and a sequence selected from the group consisting of SEQ ID NOs: 934-947; or
wherein the CRISPR nuclease comprises a sequence having at least 90% identity to the amino acid sequence set forth in SEQ ID NO: 58, and at least one RNA molecule comprises a sequence selected from the group consisting of SEQ ID NOs: 948-963; and/or
wherein the CRISPR nuclease comprises a sequence having at least 90% identity to the amino acid sequence set forth in SEQ ID NO: 58 and at least one RNA molecule is a CRISPR RNA (crRNA) molecule comprising a guide sequence portion and a sequence selected from the group consisting of SEQ ID NOs: 948-951, and preferably wherein the composition further comprises a transactivating CRISPR RNA (tracrRNA) molecule comprising a sequence set forth in the group consisting of SEQ ID NOs: 952-960 and 963; and/or
wherein the CRISPR nuclease comprises a sequence having at least 90% identity to the amino acid sequence set forth in SEQ ID NO: 58 and at least one RNA molecule is a single-guide RNA (sgRNA) molecule comprising a guide sequence portion and a sequence selected from the group consisting of SEQ ID NOs: 948-963; and/or
wherein the CRISPR nuclease comprises a sequence having at least 90% identity to the amino acid sequence set forth in SEQ ID NO: 59, and at least one RNA molecule comprises a sequence selected from the group consisting of SEQ ID NOS: 964-977; and/or
wherein the CRISPR nuclease comprises a sequence having at least 90% identity to the amino acid sequence set forth in SEQ ID NO: 59 and at least one RNA molecule is a CRISPR RNA (crRNA) molecule comprising a guide sequence portion and a sequence selected from the group consisting of SEQ ID NOs: 964-967, and preferably wherein the composition further comprises a transactivating CRISPR RNA (tracrRNA) molecule comprising a sequence set forth in the group consisting of SEQ ID NOs: 968-976; and/or
wherein the CRISPR nuclease comprises a sequence having at least 90% identity to the amino acid sequence set forth in SEQ ID NO: 59 and at least one RNA molecule is a single-guide RNA (sgRNA) molecule comprising a guide sequence portion and a sequence selected from the group consisting of SEQ ID NOs: 964-977; or
wherein the CRISPR nuclease comprises a sequence having at least 90% identity to the amino acid sequence set forth in SEQ ID NO: 60, and at least one RNA molecule comprises a sequence selected from the group consisting of SEQ ID NOs: 978-993; and/or
wherein the CRISPR nuclease comprises a sequence having at least 90% identity to the amino acid sequence set forth in SEQ ID NO: 60 and at least one RNA molecule is a CRISPR RNA (crRNA) molecule comprising a guide sequence portion and a sequence selected from the group consisting of SEQ ID NOs: 978-981, and preferably wherein the composition further comprises a transactivating CRISPR RNA (tracrRNA) molecule comprising a sequence set forth in the group consisting of SEQ ID NOs: 982-990 and 993; and/or
wherein the CRISPR nuclease comprises a sequence having at least 90% identity to the amino acid sequence set forth in SEQ ID NO: 60 and at least one RNA molecule is a single-guide RNA (sgRNA) molecule comprising a guide sequence portion and a sequence selected from the group consisting of SEQ ID NOs: 978-993; or
wherein the CRISPR nuclease comprises a sequence having at least 90% identity to the amino acid sequence set forth in SEQ ID NO: 61, and at least one RNA molecule comprises a sequence selected from the group consisting of SEQ ID NOS: 994-1009; and/or
wherein the CRISPR nuclease comprises a sequence having at least 90% identity to the amino acid sequence set forth in SEQ ID NO: 61 and at least one RNA molecule is a CRISPR RNA (crRNA) molecule comprising a guide sequence portion and a sequence selected from the group consisting of SEQ ID NOs: 994-997, and preferably wherein the composition further comprises a transactivating CRISPR RNA (tracrRNA) molecule comprising a sequence set forth in the group consisting of SEQ ID NOS: 998-1006 and 1009;
and/or wherein the CRISPR nuclease comprises a sequence having at least 90% identity to the amino acid sequence set forth in SEQ ID NO: 61 and at least one RNA molecule is a single-guide RNA (sgRNA) molecule comprising a guide sequence portion and a sequence selected from the group consisting of SEQ ID NOs: 994-1009; or
wherein the CRISPR nuclease comprises a sequence having at least 90% identity to the amino acid sequence set forth in SEQ ID NO: 62, and at least one RNA molecule comprises a sequence selected from the group consisting of SEQ ID NOs: 1010-1023; and/or
wherein the CRISPR nuclease comprises a sequence having at least 90% identity to the amino acid sequence set forth in SEQ ID NO: 62 and at least one RNA molecule is a CRISPR RNA (crRNA) molecule comprising a guide sequence portion and a sequence selected from the group consisting of SEQ ID NOs: 1010-1013, and preferably wherein the composition further comprises a transactivating CRISPR RNA (tracrRNA) molecule comprising a sequence set forth in the group consisting of SEQ ID NOS: 1014-1022; and/or
wherein the CRISPR nuclease comprises a sequence having at least 90% identity to the amino acid sequence set forth in SEQ ID NO: 62 and at least one RNA molecule is a single-guide RNA (sgRNA) molecule comprising a guide sequence portion and a sequence selected from the group consisting of SEQ ID NOs: 1010-1023; or
wherein the CRISPR nuclease comprises a sequence having at least 63 or SEQ ID NO: 64, and at least one RNA molecule comprises a sequence selected from the group consisting of SEQ ID NOs: 1024-1051; and/or
wherein the CRISPR nuclease comprises a sequence having at least 90% identity to the amino acid sequence set forth in SEQ ID NO: 63 or SEQ ID NO: 64 and at least one RNA molecule is a CRISPR RNA (crRNA) molecule comprising a guide sequence portion and a sequence selected from the group consisting of SEQ ID NOS: 1024-1027 and 1038-1041, and preferably wherein the composition further comprises a transactivating CRISPR RNA (tracrRNA) molecule comprising a sequence set forth in the group consisting of SEQ ID NOs: 1028-1036 and 1042-1050; and/or
wherein the CRISPR nuclease comprises a sequence having at least 90% identity to the amino acid sequence set forth in SEQ ID NO: 63 or SEQ ID NO: 64 and at least one RNA molecule is a single-guide RNA (sgRNA) molecule comprising a guide sequence portion and a sequence selected from the group consisting of SEQ ID NOS: 1024-1051; or
wherein the CRISPR nuclease comprises a sequence having at least 90% identity to the amino acid sequence set forth in SEQ ID NO: 65, and at least one RNA molecule comprises a sequence selected from the group consisting of SEQ ID NOs: 1052-1067; and/or
wherein the CRISPR nuclease comprises a sequence having at least 90% identity to the amino acid sequence set forth in SEQ ID NO: 65 and at least one RNA molecule is a CRISPR RNA (crRNA) molecule comprising a guide sequence portion and a sequence selected from the group consisting of SEQ ID NOs: 1052-1055, and preferably wherein the composition further comprises a transactivating CRISPR RNA (tracrRNA) molecule comprising a sequence set forth in the group consisting of SEQ ID NOs: 1056-1063, 1066, and 1067; and/or
wherein the CRISPR nuclease comprises a sequence having at least 90% identity to the amino acid sequence set forth in SEQ ID NO: 65 and at least one RNA molecule is a single-guide RNA (sgRNA) molecule comprising a guide sequence portion and a sequence selected from the group consisting of SEQ ID NOs: 1052-1067; or
wherein the CRISPR nuclease comprises a sequence having at least 90% identity to the amino acid sequence set forth in SEQ ID NO: 66, and at least one RNA molecule comprises a sequence selected from the group consisting of SEQ ID NOs: 1068-1081; and/or
wherein the CRISPR nuclease comprises a sequence having at least 90% identity to the amino acid sequence set forth in SEQ ID NO: 66 and at least one RNA molecule is a CRISPR RNA (crRNA) molecule comprising a guide sequence portion and a sequence selected from the group consisting of SEQ ID NOs: 1068-1071, and preferably wherein the composition further comprises a transactivating CRISPR RNA (tracrRNA) molecule comprising a sequence set forth in the group consisting of SEQ ID NOs: 1072-1078 and 1081;
and/or wherein the CRISPR nuclease comprises a sequence having at least 90% identity to the amino acid sequence set forth in SEQ ID NO: 66 and at least one RNA molecule is a single-guide RNA (sgRNA) molecule comprising a guide sequence portion and a sequence selected from the group consisting of SEQ ID NOs: 1068-1081; or
wherein the CRISPR nuclease comprises a sequence having at least 90% identity to the amino acid sequence set forth in SEQ ID NO: 67, and at least one RNA molecule comprises a sequence selected from the group consisting of SEQ ID NOs: 1082-1095; and/or
wherein the CRISPR nuclease comprises a sequence having at least 90% identity to the amino acid sequence set forth in SEQ ID NO: 67 and at least one RNA molecule is a CRISPR RNA (crRNA) molecule comprising a guide sequence portion and a sequence selected from the group consisting of SEQ ID NOs: 1082-1085, and preferably wherein the composition further comprises a transactivating CRISPR RNA (tracrRNA) molecule comprising a sequence set forth in the group consisting of SEQ ID NOS: 1086-1094; and/or
wherein the CRISPR nuclease comprises a sequence having at least 90% identity to the amino acid sequence set forth in SEQ ID NO: 67 and at least one RNA molecule is a single-guide RNA (sgRNA) molecule comprising a guide sequence portion and a sequence selected from the group consisting of SEQ ID NOs: 1082-1095; or
wherein the CRISPR nuclease comprises a sequence having at least 90% identity to the amino acid sequence set forth in SEQ ID NO: 68, and at least one RNA molecule comprises a sequence selected from the group consisting of SEQ ID NOs: 1096-1111; and/or
wherein the CRISPR nuclease comprises a sequence having at least 90% identity to the amino acid sequence set forth in SEQ ID NO: 68 and at least one RNA molecule is a CRISPR RNA (crRNA) molecule comprising a guide sequence portion and a sequence selected from the group consisting of SEQ ID NOs: 1096-1099, and preferably wherein the composition further comprises a transactivating CRISPR RNA (tracrRNA) molecule comprising a sequence set forth in the group consisting of SEQ ID NOs: 1100-1108 and 1111; and/or
wherein the CRISPR nuclease comprises a sequence having at least 90% identity to the amino acid sequence set forth in SEQ ID NO: 68 and at least one RNA molecule is a single-guide RNA (sgRNA) molecule comprising a guide sequence portion and a sequence selected from the group consisting of SEQ ID NOs: 1096-1111; or
wherein the CRISPR nuclease comprises a sequence having at least 90% identity to the amino acid sequence set forth in SEQ ID NO: 69, and at least one RNA molecule comprises a sequence selected from the group consisting of SEQ ID NOS: 1112-1125, and preferably wherein the composition further comprises; and/or
wherein the CRISPR nuclease comprises a sequence having at least 90% identity to the amino acid sequence set forth in SEQ ID NO: 69 and at least one RNA molecule is a CRISPR RNA (crRNA) molecule comprising a guide sequence portion and a sequence selected from the group consisting of SEQ ID NOs: 1112-1115, and preferably wherein the composition further comprises a transactivating CRISPR RNA (tracrRNA) molecule comprising a sequence set forth in the group consisting of SEQ ID NOS: 1116-1124; and/or
wherein the CRISPR nuclease comprises a sequence having at least 90% identity to the amino acid sequence set forth in SEQ ID NO: 69 and at least one RNA molecule is a single-guide RNA (sgRNA) molecule comprising a guide sequence portion and a sequence selected from the group consisting of SEQ ID NOs: 1112-1125; and/or
wherein the CRISPR nuclease comprises a sequence having at least 90% identity to the amino acid sequence set forth in SEQ ID NO: 70, SEQ ID NO: 71, SEQ ID NO: 72, or SEQ ID NO: 73 and at least one RNA molecule comprises a sequence selected from the group consisting of SEQ ID NOs: 1126-1138; and/or
wherein the CRISPR nuclease comprises a sequence having at least 90% identity to the amino acid sequence set forth in SEQ ID NO: 70, SEQ ID NO: 71, SEQ ID NO: 72, or SEQ ID NO: 73 and at least one RNA molecule is a CRISPR RNA (crRNA) molecule comprising a guide sequence portion and a sequence selected from the group consisting of SEQ ID NOs: 1126-1129, and preferably wherein the composition further comprises a transactivating CRISPR RNA (tracrRNA) molecule comprising a sequence set forth in the group consisting of SEQ ID NOs: 1130-1137; and/or
wherein the CRISPR nuclease comprises a sequence having at least 90% identity to the amino acid sequence set forth in SEQ ID NO: 70, SEQ ID NO: 71, SEQ ID NO: 72, or SEQ ID NO: 73 and at least one RNA molecule is a single-guide RNA (sgRNA) molecule comprising a guide sequence portion and a sequence selected from the group consisting of SEQ ID NOs: 1126-1138; or
wherein the CRISPR nuclease comprises a sequence having at least 90% identity to the amino acid sequence set forth in SEQ ID NO: 74, and at least one RNA molecule comprises a sequence selected from the group consisting of SEQ ID NOs: 1139-1150; and/or
wherein the CRISPR nuclease comprises a sequence having at least 90% identity to the amino acid sequence set forth in SEQ ID NO: 74 and at least one RNA molecule is a CRISPR RNA (crRNA) molecule comprising a guide sequence portion and a sequence selected from the group consisting of SEQ ID NOS: 1139-1142, and preferably wherein the composition further comprises a transactivating CRISPR RNA (tracrRNA) molecule comprising a sequence set forth in the group consisting of SEQ ID NOs: 1143-1149; and/or
wherein the CRISPR nuclease comprises a sequence having at least 90% identity to the amino acid sequence set forth in SEQ ID NO: 74 and at least one RNA molecule is a single-guide RNA (sgRNA) molecule comprising a guide sequence portion and a sequence selected from the group consisting of SEQ ID NOs: 1139-1150; or
wherein the CRISPR nuclease comprises a sequence having at least 75, and at least one RNA molecule comprises a sequence selected from the group consisting of SEQ ID NOs: 1151-1166; and/or
wherein the CRISPR nuclease comprises a sequence having at least 90% identity to the amino acid sequence set forth in SEQ ID NO: 75 and at least one RNA molecule is a CRISPR RNA (crRNA) molecule comprising a guide sequence portion and a sequence selected from the group consisting of SEQ ID NOs: 1151-1154, and preferably wherein the composition further comprises a transactivating CRISPR RNA (tracrRNA) molecule comprising a sequence set forth in the group consisting of SEQ ID NOs: 1155-1163 and 1166; and/or
wherein the CRISPR nuclease comprises a sequence having at least 90% identity to the amino acid sequence set forth in SEQ ID NO: 75 and at least one RNA molecule is a single-guide RNA (sgRNA) molecule comprising a guide sequence portion and a sequence selected from the group consisting of SEQ ID NOS: 1151-1166; or
wherein the CRISPR nuclease comprises a sequence having at least 90% identity to the amino acid sequence set forth in SEQ ID NO: 76, and at least one RNA molecule comprises a sequence selected from the group consisting of SEQ ID NOs: 1167-1178; and/or
wherein the CRISPR nuclease comprises a sequence having at least 90% identity to the amino acid sequence set forth in SEQ ID NO: 76 and at least one RNA molecule is a CRISPR RNA (crRNA) molecule comprising a guide sequence portion and a sequence selected from the group consisting of SEQ ID NOs: 1167-1170, and preferably wherein the composition further comprises a transactivating CRISPR RNA (tracrRNA) molecule comprising a sequence set forth in the group consisting of SEQ ID NOs: 1171-1177; and/or
wherein the CRISPR nuclease comprises a sequence having at least 90% identity to the amino acid sequence set forth in SEQ ID NO: 76 and at least one RNA molecule is a single-guide RNA (sgRNA) molecule comprising a guide sequence portion and a sequence selected from the group consisting of SEQ ID NOs: 1167-1178; or
wherein the CRISPR nuclease comprises a sequence having at least 90% identity to the amino acid sequence set forth in SEQ ID NO: 77 or SEQ ID NO: 78, and at least one RNA molecule comprises a sequence selected from the group consisting of SEQ ID NOs: 1179-1202; and/or
wherein the CRISPR nuclease comprises a sequence having at least 90% identity to the amino acid sequence set forth in SEQ ID NO: 77 or SEQ ID NO: 78 and at least one RNA molecule is a CRISPR RNA (crRNA) molecule comprising a guide sequence portion and a sequence selected from the group consisting of SEQ ID NOs: 1179-1182 and 1191-1194, and preferably wherein the composition further comprises a transactivating CRISPR RNA (tracrRNA) molecule comprising a sequence set forth in the group consisting of SEQ ID NOs: 1183-1189 and 1195-1201; and/or
wherein the CRISPR nuclease comprises a sequence having at least 90% identity to the amino acid sequence set forth SEQ ID NO: 77 or SEQ ID NO: 78 and at least one RNA molecule is a single-guide RNA (sgRNA) molecule comprising a guide sequence portion and a sequence selected from the group consisting of SEQ ID NOs: 1179-1202; or
wherein the CRISPR nuclease comprises a sequence having at least 79, and at least one RNA molecule comprises a sequence selected from the group consisting of SEQ ID NOs: 1203-1215; and/or
wherein the CRISPR nuclease comprises a sequence having at least 90% identity to the amino acid sequence set forth in SEQ ID NO: 79 and at least one RNA molecule is a CRISPR RNA (crRNA) molecule comprising a guide sequence portion and a sequence selected from the group consisting of SEQ ID NOs: 1203-1206, and preferably wherein the composition further comprises a transactivating CRISPR RNA (tracrRNA) molecule comprising a sequence set forth in the group consisting of SEQ ID NOS: 1207-1214; and/or
wherein the CRISPR nuclease comprises a sequence having at least 90% identity to the amino acid sequence set forth in SEQ ID NO: 79 and at least one RNA molecule is a single-guide RNA (sgRNA) molecule comprising a guide sequence portion and a sequence selected from the group consisting of SEQ ID NOs: 1203-1215; or
wherein the CRISPR nuclease comprises a sequence having at least 90% identity to the amino acid sequence set forth in SEQ ID NO: 80, and at least one RNA molecule comprises a sequence selected from the group consisting of SEQ ID NOs: 1216-1227; and/or
wherein the CRISPR nuclease comprises a sequence having at least 90% identity to the amino acid sequence set forth in SEQ ID NO: 80 and at least one RNA molecule is a CRISPR RNA (crRNA) molecule comprising a guide sequence portion and a sequence selected from the group consisting of SEQ ID NOs: 1216-1219, and preferably wherein the composition further comprises a transactivating CRISPR RNA (tracrRNA) molecule comprising a sequence set forth in the group consisting of SEQ ID NOs: 1220-1226; and/or
wherein the CRISPR nuclease comprises a sequence having at least 90% identity to the amino acid sequence set forth in SEQ ID NO: 80 and at least one RNA molecule is a single-guide RNA (sgRNA) molecule comprising a guide sequence portion and a sequence selected from the group consisting of SEQ ID NOs: 1216-1227; or
wherein the CRISPR nuclease comprises a sequence having at least 90% identity to the amino acid sequence set forth in SEQ ID NO: 81, and at least one RNA molecule comprises a sequence selected from the group consisting of SEQ ID NOs: 1228-1240; and/or
wherein the CRISPR nuclease comprises a sequence having at least 90% identity to the amino acid sequence set forth in SEQ ID NO: 81 and at least one RNA molecule is a CRISPR RNA (crRNA) molecule comprising a guide sequence portion and a sequence selected from the group consisting of SEQ ID NOs: 1228-1231, and preferably wherein the composition further comprises a transactivating CRISPR RNA (tracrRNA) molecule comprising a sequence set forth in the group consisting of SEQ ID NOS: 1232-1239; and/or
wherein the CRISPR nuclease comprises a sequence having at least 90% identity to the amino acid sequence set forth in SEQ ID NO: 81 and at least one RNA molecule is a single-guide RNA (sgRNA) molecule comprising a guide sequence portion and a sequence selected from the group consisting of SEQ ID NOS: 1228-1240; or
wherein the CRISPR nuclease comprises a sequence having at least 90% identity to the amino acid sequence set forth in SEQ ID NO: 82 or SEQ ID NO: 83, and at least one RNA molecule comprises a sequence selected from the group consisting of SEQ ID NOs: 1241-1252 and GCUUUAAGC; and/or
wherein the CRISPR nuclease comprises a sequence having at least 90% identity to the amino acid sequence set forth in SEQ ID NO: 82 or SEQ ID NO: 83 and at least one RNA molecule is a CRISPR RNA (crRNA) molecule comprising a guide sequence portion and a sequence selected from the group consisting of SEQ ID NOs: 1241-1244, and preferably wherein the composition further comprises, and preferably wherein the composition further comprises a transactivating CRISPR RNA (tracrRNA) molecule comprising a sequence set forth in the group consisting of SEQ ID NOS: 1245-1251 and GCUUUAAGC; and/or
wherein the CRISPR nuclease comprises a sequence having at least 90% identity to the amino acid sequence set forth in SEQ ID NO: 82 or SEQ ID NO: 83 and at least one RNA molecule is a single-guide RNA (sgRNA) molecule comprising a guide sequence portion and a sequence selected from the group consisting of SEQ ID NOs: 1241-1252 and GCUUUAAGC; and/or
wherein the CRISPR nuclease comprises a sequence having at least 90% identity to the amino acid sequence set forth in SEQ ID NO: 84, and at least one RNA molecule comprises a sequence selected from the group consisting of SEQ ID NOS: 1253-1265; and/or
wherein the CRISPR nuclease comprises a sequence having at least 90% identity to the amino acid sequence set forth in SEQ ID NO: 84 and at least one RNA molecule is a CRISPR RNA (crRNA) molecule comprising a guide sequence portion and a sequence selected from the group consisting of SEQ ID NOS: 1253-1256, and preferably wherein the composition further comprises a transactivating CRISPR RNA (tracrRNA) molecule comprising a sequence set forth in the group consisting of SEQ ID NOs: 1257-1264; and/or
wherein the CRISPR nuclease comprises a sequence having at least 90% identity to the amino acid sequence set forth in SEQ ID NO: 84 and at least one RNA molecule is a single-guide RNA (sgRNA) molecule comprising a guide sequence portion and a sequence selected from the group consisting of SEQ ID NOs: 1253-1265; or
wherein the CRISPR nuclease comprises a sequence having at least 90% identity to the amino acid sequence set forth in SEQ ID NO: 85, and at least one RNA molecule comprises a sequence selected from the group consisting of SEQ ID NOs: 1266-1280; and/or
wherein the CRISPR nuclease comprises a sequence having at least 90% identity to the amino acid sequence set forth in SEQ ID NO: 85 and at least one RNA molecule is a CRISPR RNA (crRNA) molecule comprising a guide sequence portion and a sequence selected from the group consisting of SEQ ID NOS: 1266-1269 and 1279, and preferably wherein the composition further comprises a transactivating CRISPR RNA (tracrRNA) molecule comprising a sequence set forth in the group consisting of SEQ ID NOS: 1270-1276 and 1280; and/or
wherein the CRISPR nuclease comprises a sequence having at least 90% identity to the amino acid sequence set forth in SEQ ID NO: 85 and at least one RNA molecule is a single-guide RNA (sgRNA) molecule comprising a guide sequence portion and a sequence selected from the group consisting of SEQ ID NOs: 1266-1280; or
wherein the CRISPR nuclease comprises a sequence having at least 90% identity to the amino acid sequence set forth in SEQ ID NO: 86, and at least one RNA molecule comprises a sequence selected from the group consisting of SEQ ID NOs: 1281-1298; and/or
wherein the CRISPR nuclease comprises a sequence having at least 90% identity to the amino acid sequence set forth in SEQ ID NO: 86 and at least one RNA molecule is a CRISPR RNA (crRNA) molecule comprising a guide sequence portion and a sequence selected from the group consisting of SEQ ID NOs: 1281-1284 and 1296, and preferably wherein the composition further comprises a transactivating CRISPR RNA (tracrRNA) molecule comprising a sequence set forth in the group consisting of SEQ ID NOS: 1285-1293, 1297, and 1298; and/or
wherein the CRISPR nuclease comprises a sequence having at least 90% identity to the amino acid sequence set forth in SEQ ID NO: 86 and at least one RNA molecule is a single-guide RNA (sgRNA) molecule comprising a guide sequence portion and a sequence selected from the group consisting of SEQ ID NOs: 1281-1298; or
wherein the CRISPR nuclease comprises a sequence having at least 90% identity to the amino acid sequence set forth in SEQ ID NO: 87, and at least one RNA molecule comprises a sequence selected from the group consisting of SEQ ID NOs: 1299-1314; and/or
wherein the CRISPR nuclease comprises a sequence having at least 90% identity to the amino acid sequence set forth in SEQ ID NO: 87 and at least one RNA molecule is a CRISPR RNA (crRNA) molecule comprising a guide sequence portion and a sequence selected from the group consisting of SEQ ID NOS: 1299-1302 and 1314, and preferably wherein the composition further comprises a transactivating CRISPR RNA (tracrRNA) molecule comprising a sequence set forth in the group consisting of SEQ ID NOS: 1303-1311; and/or
wherein the CRISPR nuclease comprises a sequence having at least 90% identity to the amino acid sequence set forth in SEQ ID NO: 87 and at least one RNA molecule is a single-guide RNA (sgRNA) molecule comprising a guide sequence portion and a sequence selected from the group consisting of SEQ ID NOs: 1299-1314; or
wherein the CRISPR nuclease comprises a sequence having at least 88, and at least one RNA molecule comprises a sequence selected from the group consisting of SEQ ID NOs: 1315-1329; and/or
wherein the CRISPR nuclease comprises a sequence having at least 90% identity to the amino acid sequence set forth in SEQ ID NO: 88 and at least one RNA molecule is a CRISPR RNA (crRNA) molecule comprising a guide sequence portion and a sequence selected from the group consisting of SEQ ID NOS: 1315-1318 and 1329, and preferably wherein the composition further comprises a transactivating CRISPR RNA (tracrRNA) molecule comprising a sequence set forth in the group consisting of SEQ ID NOS: 1319-1326; and/or
wherein the CRISPR nuclease comprises a sequence having at least 90% identity to the amino acid sequence set forth in SEQ ID NO: 88 and at least one RNA molecule is a single-guide RNA (sgRNA) molecule comprising a guide sequence portion and a sequence selected from the group consisting of SEQ ID NOs: 1315-1329.

4-286. (canceled)

287. The composition of claim 1, wherein the CRISPR nuclease is a nickase having an inactivated RuvC domain created by an amino acid substitution at a position provided for the CRISPR nuclease in column 5 of Table 1.

288. The composition of claim 1, wherein the CRISPR nuclease is a nickase having an inactivated HNH domain created by an amino acid substitution at a position provided for the CRISPR nuclease in column 6 of Table 1.

289. The composition of claim 1, wherein the CRISPR nuclease is a catalytically dead nuclease having an inactivated RuvC domain and an inactivated HNH domain created by substitutions at the positions provided for the CRISPR nuclease in column 7 of Table 1.

290. The composition of claim 1, wherein the CRISPR nuclease utilizes a protospacer adjacent motif (PAM) sequence provided for the CRISPR nuclease in column columns 2-4 of Table 3.

291. A method of modifying a nucleotide sequence at a DNA target site in a cell-free system or the genome of a cell comprising introducing into the cell the composition of claim 2.

292. The method of claim 291, wherein the CRISPR nuclease effects a DNA break in a DNA strand adjacent to a protospacer adjacent motif (PAM) sequence provided for the CRISPR nuclease in columns 2-4 of Table 3, and/or effects a DNA break in a DNA strand adjacent to a sequence that is complementary to the PAM sequence, or
wherein the CRISPR nuclease has an amino acid sequence having at least 95% sequence identity to SEQ ID NO: 68 and effects a DNA break in a DNA strand adjacent to a NNNRCNNN, NRVRCNNN, or NVNRCNNN protospacer adjacent motif (PAM) sequence, and/or effects a DNA break in a DNA strand adjacent to a sequence that is complementary to the PAM sequence.

293. The method of claim 292, wherein the CRISPR nuclease is a nickase having an inactivated RuvC domain created by an amino acid substitution at a position provided for the CRISPR nuclease in column 5 of Table 1, and effects a DNA break in a DNA strand adjacent to a sequence that is complementary to the PAM sequence.

294. The method of claim 292, wherein the CRISPR nuclease is a nickase having an inactivated HNH domain created by an amino acid substitution at a position provided for the CRISPR nuclease in column 6 of Table 1, and effects a DNA break in a DNA strand adjacent to the PAM sequence.

295. The method of claim 291, wherein the cell is a eukaryotic cell or a prokaryotic cell.

296. The method of claim 295, wherein the cell is a mammalian cell.

297. The method of claim 296, wherein the cell is a human cell.

298. (canceled)
